United States Patent Application Publication US 2024/0268394 A1 - sequence listing, part 7

SEQ ID NO: 93 - DNA, 341470 bp, Pseudomonas nodulensis
gaattctacagcgttacacgctgctgtcaacacctctttttctccgctttcgaccgagaggatcgaaacgttaatagagccagacaacactgctctaccaactccttctgggcttcgataaactgaagcaagtcgctgtcgaattctgcgtaactctttgtttaccaaggagtttttcgtttcgactgcgccggaagtggggcgaattatagacttccagaatctgccgtcaacccttaattacgcttttgttgcagaaagtggttttttcgcaataaggcgcgggattctccgcattacgggcggtatccgtagcaccaacagcaacgcacctatagaagtatagatagcccattccttgaggtccgctcgcacgatccacaacatatgcagcaaacccagcccaagaattacatacaccaagcgatgcagcttcttccaacgagtccccaaccgacgttgactgtaacgattcgacgtcaccgccaaaaccaacagggaaacaaaccccagcgccccgacaataatgtagggccgcttgcgcagctccaccccaagttgcgaccaatccagcccaagcacaaatacacaataagcagccagatgcagcacaacgtacgcaaagcaccacaaccccagttgccgacgcacggctatccaccccggccaaccgctgagcttctgcagcggcgtcattgccagggtaatcagtaacagaatcaacgtgccaagccctagccgatcgaccagtaccttgcctggatccggccccaggacagaacgccacgcttcatagagccaaaacagtggccaaatcgccgctgctataaagacgccaacgcgccagatcggataacgcatcagtagttcttccgcagatcgagaccggtataaagagaggccacctcatccgagtacccattgaacatctgcgtctcacgtacattaggactgaacagcccactcggcagacgacgctcccgcgcctgagtccaacgtgggtgatcgactgtagggttcacattcgcgtagaacccatactcgtcagcagcgatgctctgccacgtggttttcggctgctcactcaccagactgatccgcacaatggacttcacactcttgaagccgtacttccaaggcaccaccaggcgcagcggcgcaccattctgattgggcaactcacgcccatacatacccaccgccaggatcgccagaggattcatcgcctcatccagacgcaagccctccacataaggccaatcgatcaagccaaaactcgaacgctgccccggcatgcttttgggatcctggagggtttcaaaacggatatacttggccttcgaggtcggttcaacttgcttgagcagcgcggagatgggaaaaccgatccatggaataaccatcgaccatgcctcaacacagcgcagacggtagatccgctcttccaactgatagggcttcatgaagtcttccaaggcataacggcctggcttagcaacctcgccatcaataacaacgctccacggctcggtcttgagtgaaccggcattcgtggccgggtcacccttacctgtaccgaactcatagaagttgttgtagtgcgtagcgtctttgaaaggcgtgatcgcctcgtccttcaccgtgactgcctgccacttggtgcccggcagcttctcggcaaaccaactcggcgccctgcccgcttcaacatcggcatagcgcgacacctcgtcggcaccggccaaacgcggcaagctgctggctgcaatgccggcaagcgcaccgccgagcaagctgcggcgagagagatagaaggattcaggcgtgacatccgactcatggcaatcggacgctttgggtaatttgattaacatggcaactccgcagcattggaggactgatgcaccaatagactgcggagtatgggggaaattacattaaggcaatgttttgtcccggcgcagatgcagcaagtactgaaccggccccgaagcggcgtacaccaggaacgccagcaacaggatgcgcggcggatcactgaacaccacggcaaacaccagcacaactgccagaatcgctacgaaaggtacacgccccttcaagtcgagttccttgaagctgttgtacttgatgttgctgaccatcagcatgccggcagcggccaccatcaaggccaccagaaacgacatcttcgacccctggatgccgtaatcactgaaggcccagacaatacccgccaccacacccgcagcagcagggctggccagaccgatgaagtaacgcttgtcggcagtccccacctgggtattgaagcgcgccaggcgcaaggcagcaccggcaacatagatgaaggcaaccatccagccaaccttacccatatcacccagcgcccaggcaaacgccagcaatgcgggggcgacgccaaacgcaaccatgtccgacaacgagtcgtactcggcaccgaatgcgctctgggtattggtcatgcgcgccacacggccatcaaggccgtctagcaccatggccacgaagattgcgatggcagcaaaaccgaaatacttgctggcgctcgccgcatcacccgctgccagggcactctgtgcgctcatggagttgatgatggagtagaacccggcaaacaggttcgccgtggtaaacaggttgggcagcagatagatgccacgatgccggaccttgcgaccttccgcgtcatgcccttcctcaacatgttcatcgatcggcagcaggctttcggcgtcaggagcctggcttggctcttcgggacgttcgctcatggactttaccttgcaacggtgtgaaaaaagttcgacagaaacttgcggccagtgttcgcccgcaaacgatgcagctttataccagaacccgccgcccaaacgaaaaaacgcggcctaggccgcgttttcccttgatacgtacgacttagttcttggctttgtcgacgatcttgttggcaccgatccacggcatcatggagcgcagctgctcgccgatgacttcgataccgtgagcggcgttgttacgacgcttggcagtcatcgaagggtagccggtagcgccttcgctgatgaacattttggcgtattcgccgtcctgaatacgtttcagggcgttgcgcatggcctgacgggactcggcgttgatcacttccgggccagtcacgtactcgccgtattcggcgttgttggagatcgagtagttcatgttggcgataccgccttcgtacatgaggtcaacgatcagtttcagttcgtgcaggcactcgaagtaggccatttctggcgcgtagcccgcttcaaccagggtttcgaagccggcttttaccagttcgacggtgccgccgcacagtacggcttgttcgccgaacaggtcggtttcagtctcgtccttgaaggtggtttcgatgatgccggtacgaccgccaccgacgccagcagcgtaggacagtgctacgttcttggcgttgcccgatgcgtcctggtagatcgcgatcaggtcaggaataccgccgcctttgacgaactcggaacgtacagtgtgacccggcgcttttggcgcgatcatgatcacgtccaggtcagcgcgtggcacgacctggttgtagtggatcgcgaagccgtgggagaaggccagggtagcgcccttcttgatgttcggctcgatttcgttcttgtacagcgcggactggaactcgtccggggtcaggatcatgaccaggtcggcagcagcaacagcggaagcaacgtcagtcaccttcaggccgtgggcttcagccttggcaacagtggccgagcctttgcgcaggccaacggtcacgtcaacgccggaatctttcaggttgcacgcttgcgcgtgaccttgggaaccgtagccgatgatggcgactttcttgccctggatgatcgacaggtcacaatctttatcgtaataaactttcatgaggttcctctatatatccaggccgtaaggccattcgctaatttgggttagatgctgagtactttgtcgccacgggcaatgccggtgacaccactgcgtaccgtttccagaatcgaggccgtcccgatcgactggataaagctgtccagcttgtcgctcgtaccggtcagttgaacggtataaacgctggcgctcacatcgacgatctgcccgcgataaatgtcggtcgtgcgcttgatctcggcacgttgggcacccgtagccttgactttaaccagcatcagctcgcgctcgatgtgggcactctccgacaggtcgaccagcttgaccacttcgatcagcttgttgaggttcttggtgatctgctcgatcacctcatcatggcctacggtggtcaacgtcagacgcgacagggtcgggtcttcggtcggggccacagtcaggctttcgatgttgtagttgcgttgcgaaaacaggccgacaacacgagacagagcgccgggttcgttctccagaagcagggagataatgtgccgcatgattaagtacgctccgtcttgttcagccacatgtcgcgcatagagccgtctttgatctgcatcgggtagacgtgctcactggtatccacctgaatatcgatgaacaccaggcggtccttcatggcgaacgcctcttccatcttcggcttcagatctttcagatcggtgatgcgaatgccgacgtggccataggcttcaaccaattttacgaaatccggcagcgactccatgtaggagtgggagtgacggctgttgtagctcatgtcctgccattgacgaaccatgcccagcacgccgttgttcaggcagacaatcttcaccggaaggccgtactgcaggcacgtcgacagttcctggatgttcatctggatgctgccctcaccggtgacgcacgcaacgtcagtgtccgggaagctcagtttcacacccatggccgcaggaaaaccaaagcccatcgtgcccagcccaccggagttgatccagcggttaggtttgtcgaacttgtagtactgcgccgcaaacatctggtgctggcccacgtcggaggtcacaaaggcgtcgcccttggtcacttcgcacagggtctcgatcacggtttgtggcttgatgatgctgccgtcacccttgtcgtaagggaacaggccgcgatcaccgcgccattcgtcgatctgcttccaccagcttgcaacggattccttgttcggcgtctcaccgatgtccttgagcgcggcaaccatttcggtcaacacgctttcaacaggacctacgatcggcacatcggccttgatggtcttggagatggacgccgggtcgatgtcgatatggatgatcttggcattcgggcagaacttgctcgcgccattgatcacacggtcatcgaaccgcgcgcccacggccaggatcacgtcggcatggtgcatggtcaggttggcggtgtagctgccgtgcatgccgagcataccgacgaactgacggtccgtacccgggaaagcgccgaggcccatcagggtgttggtgaccggcaggttgagcagcttggccagttcggtcagcggtgcagaaccgccgcccaggatcacaccaccgcccgagtacagcactgggcgcttggccgccaacagcatttctgccgccttgcggatttgccccgaatgcccgcggaccgccgggctgtaggagcgcagcttggctttcttcgggaagatgtattcgaatttttcggccggattggtcatgtctttggggatatcgaccaccacaggacccgggcgaccggactgtgcgaggtagaaggcctttttcatgacttccgggatttccgaaggatgcttgatcatgaagctgtgtttcacgatcggccgggagataccgatcatgtcggtttcctggaatgcatcggtccccaccatggtgctgggcacctggccggaaatgaccaccatcgggatagagtccatatacgcagtcgcgatgccagtgatggcattggttgcgcctgggccggacgttaccagtaccacgccggctttaccggtggcacgggcataaccgtcagccatatgggtcgcggcctgttcgtggcgaaccaggatgtgggtaacagccggttccttgaacagtgcgtcgtaaacatgcagcagagcaccacctgggtacccgtagatatagtcgacgccttcgtcacgcaaaaagcggacgagcatctcaccgccagataaaagctccacgttgttcacctctaaaacgccagaataccgtccgttgaaaaccgacgggtcttaataggtttacttctcaacagagcatgagcgacggtggtcgccgactacgtcagcactgactgagcaagtattgggatcgtcccaagtgttgcgggcttttcccacccagcgcgaggtaacgcgttgcgggtgtaacaggtcggcgcggatgtgcgcctcatgatctgctgagcgggcctgcttctggcagtcccgatacagcggactttggattcttctgtttcaggcccttcaagtcaagcaataattgcgcttttttccaactaagcgcatgagaacgtagaagaaagggctttgaggagggataaaactcgcctgaatgtcgtcaagcggtagaaatgtgcgcaagactgccgaaaaaaccgacagtcaggcaattaacgagcgtcgacgatcagttggtcgaactttttcagcgcattacgtaagccaaggctttccagcgggcgatcggcgtagaccatctcggccatttccagaatgcccgacgcattgggcagcggcaggtcctgctcgaggatctgcttcatgcgcaccaggaatatccattgcagccactggtgaaagtccagcgtgtccaccgaaaagggttcgacgctgctgagcgcctcgacgctgggggacacctcgtcccaccagccctgcacacgcaactctcgttcgatcagcagcaactgttcggcaatggcgggaaaccgtgcatccatcagaggctgaccttggctttctggcgcgcctgggcggcaccggcggcgtcgccttgcgcggcacgcgcgtcaccaatcaaggcccacaggctggcttgcaggtctggacgaccgttggccagggtcaggccacgacgggcgaattgctcggcctgcggcgcgtcgccctgggccatgcgcacctgggccaggcgatatagcacttgcggttcacgcggcgcaacgcgctgggcacgttcgagactcgaagacgcaccgttcagatcaccacccgcctgctgttgctgggcagtggtcaacagggccagcaccggcccgtccaattgctcgtcagccgacaggccgccgccgctggaggacgagggaatgccactcggcgtcgatggcatgttgtaggtgccctgggtggccggggccgtctgaatcggcgtggtatcgatcggacctgagttgctcgggccaggggtccacggctcggcgctgattggtgccgatgtggccgcaccaccgccaggcaccatcaccaccacgcccgaatcctgcggcacagcttgcggcttggcctgggcgggacggttggtcacggtctggcggaacccgccattggccgagatccggtcgttattggacacggtcgtgctcgagtccaccacgggaatggagccgcgctgcacgctggcgcaaccattgagcaaagccagagctgtaatagctggaatccaccacttgttcacttgaaaccctctttgcttaattcatccagcccttgacccaatccatcaccgattccgcgtctgcaggggcactgccaccgcatgcggcgccgggtggcggttcgctgccgcgaatatacggcatctgtactgcgcccggacagttggcatcggagccctgcccggtgtgcggatcgatccaggcctgcacgatgttgtccggctgcggcatgttcaacggcagcggatcggccttgcgcatgaaactggtccagacctgcaacgcaccggtggcgccggtgaacggtgtcttgccgttgtcgtcacgccccatccacaccaccgccagcacatcctggccaaaacctgcgaaccaactgtcgcgcgaatcgttactggtgccggtcttgcccgccagtgtcaggttggacggcagcaccttgtagaccgaactaccggtaccctcacgcatcacacgctgcatggcgttctggatcaagtagatggagcctgcatcgaaacgctgctgaatctggaacggataacgcttgagcggctcgccttcagcggtcagcacgctgcggatcccgcgcatcggtgtattgaaaccaccgttggccagggtctggtacatcgtcgcgacttccattggggtcattgcgccagcacccagcaggatcgaagggaacgccgggaactcacgcgtaatgcccaggcgcccgagggtcttcaggacgtttggcactcccacttcgaggccgagacgcgaagtagagatattgtaggagtgcgccaacccctggtacaggaacacggtcccgtgggagcgacgatcaaagttctgtggcgtccacacctgcccgtccgcgcctttcactgacagcggatcgtcagacagccaactggtcagggtgtacttgctcggtttttccagagccgtgaggtagaccgccggtttgaccagcgaaccaatcggccgcaccgcatccagcgcacggttgaaaccggcgaagctggccaggcggctgccgaccagggcctggacctccccggtttccgggttggtcacgaccatggccgcttcgacttcatccgcgcccttacggcccgtcatacgcttgaacgtgtcattgaccgaggcttcggccttcatctgcaggatcgggtcgaaactggtgaagatccgcaggccttcctcggtcaagtcttcgtcgcggtagtcttcacgcaactggcgcttgaccaggtcgataaagcccgggaaagaactgtctgccagcttgccgcgggtagtgacacccaatggcattttcttcgcggcagcaacttgttcagcggtggcaacaccttgctgctctaaaacatccagcaccaggttacgacgctccagcgcacgctcggggttgcggcgcgggttgtagtaggaaggccccttgaccatacccaccagcaacgcaacctggtgcagcttcagttcggaaagcggttggccaaagaagaattggctggccagaccgaaaccatgcaccgcgcgctgaccgtcctggccgacgaatacttcgttgaggtacgcctcgaggatttcctgcttgctgtagtgcaactccagcagcatcgccatcatcgcttcggtgagtttgcgggtcaggctgcgttcgttggtcaggtagaagttcttgaccaattgttgcgtcagcgtactgccgccctgggtcatcttgccgccggacgtgttcacccagactgcacgggcgatcgatttcggcgagacgccccagtgatgatagaaatcacggtcttcaacggcgaccagggtttccagcaggtaaggtggtacctgatcgagcttgatcaggatgcgatcttcaaggttcttcgggtaaataccaccgatcatcaacggttcaaggcgaaccacaggcagcttcgagccgttgagagatgataactcggcgacgtaatcgccggagaaacgcacgcgcaccggctgggctttttccaggccttcatagaactggaagccgcgggtgttcaggtcgacggtatttccgctgacagccgctgcacccggaccgttgctcacgggctcacgacgatagcccaaggcgtcgagttcggtcaggaagtcatccttgctcagcttctggccggtgaacaattccagcgggcgcgcgtacaccttggccggaatggtccagcgcttgccggagaacttctcctgcaccacagcgtcgaggtagaccgcaaagccggcaagcaccacaaggcctaccaggccaagcttgagcgcccagccaagccaggggcgcaggccacgggaaggaggttttttacgggaacggggagatcgggttcgagtcatggcggcggattatacgcactttattgatgatcaacatgagccggacagcggtttgcacaagcggtcgcagcagccataatgcccgccatgtttttccccagactctgaaggatcgcccgtgagccagtccctgatcgctgccctgcaaaatccggctttatacccccatccggttgaagcgttccaagtcatcgagacccatatttcctgggtcgtactgaccggtccttacgcctataagctaaaaaaaccgatgaacttcggatttctggacttcaccgatctggaaaagcgtggccatttctgcaacgaagagctgcgcctcaatcagcgcctgaccgaagatttgtatcttgaagtgttgccgatcaccggcacagccgaagccccgcaattgggtggcgatgggccggttatcgaatacgcactgaaaatgcgccagttcccgcaaagccagttgctcagcaccctgcaagccaatggcgaactgaccagcgcgcacatcgatgaaatggccaagcagatcgcgcacttccatctctctgcaccaaaagtgccacagcagcacccggccggcacgccggatgaggtaatggctccggttcgccagaacttcgaccagatccgcccattcctcagcgacaaggccgacctggcccagctggaagccttgcaagcctgggccgaaagcagcttcgagcgcctcaagccactgttttcccagcgcaagcaggacggcttcacccgcgaatgccacggtgatattcacctgggtaacgcaacgttgatcgacggccacgtggtgatcttcgactgcatcgagttcaacgagcccttccgcttcaccgatgtgtacgccgataccggcttcctggccatggacctggaagaccgtgggctcaagtccctggcacgtcgcttcatcagtcagtatctggagttgaccggtgactatcagggcctggaagtgttgaacttctataaagcctaccgcgccctggtccgcgccaagatcgcactgttcagcatgccgagcgaggccagcccggtgcagcgcgccacgaccctgcgccagtaccgcaactacgccaacctggcggaaagctacagcaccattccatcgcgtttcctggccattacccacggcgtttcggctgtcggtaaaagccatgtggccatgcgcctggtggaagcactgggtgcggtgcgcctgcgctcggacgtggagcgcaagcgcctgtttggcgagcaacaggtggaaaacacaccacaggccggtatctacgcggccgacgccagtgccgcgacctacgcacgcctgaacgaaatcgccgataccgtgctgcgtgccggctacccggtcgtgctggatgcgactttcctgaaacgtgaacaacgcgatgcggctgccaaagttgccgaagccacgggtgcgcctttcctgattctggattgcaacgccccacaagccgttattgccagctggttggcgcaacgtcaggcggacaaaaacgatccgtccgacgcaacactgactgttatcgaagaacagcaagcccatcgtgatccactcaccgccgaggagttgctcctcagcaagcgcgtcgagaccaatgaaagcgggaccctcgacgcactggtggcgcatattcgccagcgtctgccaggcctgtaagaaaaatttcttggtcgtgtcgcctacttggggcgcacgaccgagcaatagtggcactataatggcgtcataaatccaacgggagtcgccgtcatgagtcagcccaagcttcttgatactccgctttactcgctcctgcataaagacgatgtccgaggcttcaaccaggaacgcccaaaagacggtgtcatcgacatgcgcggtggtgacttccgcgggctggacttgcgcgaactgaacgcggcgggggtggactttaccgacgcctatttccgatctgccgatttgcgcgggctggacctgcgcaactgcccgctggagggcgccagcctggcccacgcgcagatttccggcacgtacttcccgccggaactgagcgctgacgagattctcatgtcggtcaatttcggcacacgcctgcgctatcgcactcgctgacccctcctgcttctgccccggtttcgcacaggcgtgccggggacttcccgcctgcctgacctcatcatgcttatacgtctttaggccgtttccgactaaagaactacgcttttcctactgagcgctacacttctgttcaggcttgcctggttacgatacccaccgcaccattcggccgtcgcaaggaggcttgatgaacgatgagctgcaacacctgaaaaaccttggcaagacgtcagcacagtggctgcatgcggtgggcatccatagtgcatccgacttgcgtcgcctaggtgcggtcgatgcctaccgggccgtgcggacgcgcgggtttcgtgcatcgaaagtgcttctgtatgccatcgaaggggcattgatggacgtgcattggaatgacattcctgccgaacgcaaggaagcgctgaaccgtcaacttgacgctatttcaacgcgccaaaagaattagatcgactatcaggccccatgtttacagacattccgaacgcgcgtttgagaaaacccgcagacactgagaaaacaaaggttgactctcaaatgagaatcgttatgattatcacaactggtcgcgagatcagccgataattgaaagaccattggttcggactctcagattatctcctcatcaggctaatcacggttatttgacccggcttttgccgggtctttttttgcctatggaaaagccggattcagcgcgcaatgatcagaggatgtccgcgctcgggatgggcctgcacaagcacatccagaccaaacacagctttcaagggctcaggttgcatcacctgcgccggcgtatccaaggcatgcgggcgccccgcctccagcaacagaatacggtcacagtaacgggctgcgaggttcaagtcgtgaaggatcaccaacaccgccgccccacgatcggcgaaggtacgaatggcctgcaacgtagtgtgttgatgcaaagggtccagcattgacgtcggctcatccaacagcagcgtctgccccgcttcacccggccataattgcgccaacacccgcgccaagtgcacccgctggcgctcgccaccggacaacgccacatagctgcgaccgctcaagtgcccaacatcagccgcctgcaaggccgcctcgataatctcatcatcgcgcacgcgtccagtctggtggggcaagcgccccatgccgacaacctcttcaacacggaaagcaaagtccagtgtcgagctttgtggcaacaccgccaggcgctgcgctcgttgtgccccactccactcctgcaaaggacgttgatccaggcacaccttgccttggtccggatgcaactcgccgcacagcgcaccgagcagcgtactcttgcccgctccattgggacccagcacgccaagcacttcacccggcaacagatcaagcgtgacatccgccaacacgattttgcgaccacggcagatctgcaagttttctacacgcagcatcaggcacgcccccgcaacaacaggtaaagaaaaaacggcgcgccaataaacgcagtgacgataccgattggcaactcagccggcgccagggccagccgcgcaaccagatcggcaaacaacaacagactcgcacccgccaggaccgatgcaggcaacagcacccgatgatccggccccgccagcaaacgcaccagatgcggcaccaccaatcccacgaacccaatcatgcccgcagccgccaccgccgcgcccacacccaaggcggtgcagaagaccaattcacgcttgaggccctccacatcaataccgaggtgattggcttcagactcaccgagcagcaaggcattcagcgcgcgagccctgcgcggcaaccacagcgccacgcccgcgctcaccagcaacagcggccataaccgtgaatagctggcgccgttgagactgcccaggttccaaaaagtgagggtacgcaatgtcgcgtcgtcggccaggtaggtgaacagacccaccgctgaactggcgagagccgtaagggcaatacccgcgagcagcatggtcgcgacgttggtctggccgttgcgccgtcccagccgatagaccagcgccgtcacacccaagccccccaggaatgcgcagagtgacaacagatacggcccgaacgcatccggcaaaccgccgaaaaacgaaccgccgacaatcgccaccgccgcccccaaggcggcaccgctggaaacccccaccaggcccggatcagccagggggttgcgaaaaagcccctgcattgccacaccggacaaagccaacacaccgccgaccgccaaccccagcagcgtgcgcggcaaacggatctgccccaggatcagctcagcctgctccagcccttgcgcctcgatcggcaaccccatcaaacgcagcgcggccttgagcgtatccagcaaaggcaggctgaccggccccagtgccagcgaaagccagatcgccaagacacacaacagcaccagcccaataaacagcgtcttcggtttaaccaaagtcgtcatggggcaggcttggcttgggaggggtaaaacccggcagacaggtccgctagacttcgcggcaggcgtggcccgagtcctccaaccagcaaggtggggtcgacttcaaacactcgcccgctcttggccgccggcgtggacgccaggatcgggttttccttgaacagcgccgcacgcgccgcatcgccgctgagggcacggtcagcaaacaccagcacatccgggctcaagcccgccaatgactccaccgaaaacggcttgtaaccttcatgggtcgccagattgcgcccacccgcctgctgcaacatccagtcagccgccgtgtctttgcccgcaatcagcggcttgccgcccgcgtgcccgagcaacaacaacacgcctggcgccttttgcgtggactgggccttgctcacccagcgcttctgctgatccagtgcctgctcatatccggtaaacaattcgttggccttggcctcgctgcccagcaacttacccaggtgttgaagattgcctttcaatgtaggcagatccggttgcgccgagaacatctccacctgcacgcccgcgctgcgaatctgcgccagcactggcggtggccccatttcttcggtgccgaccagcacctgcgggcgcagactcagaatgccttccgccgacaactgccgctgatagccaatgctcggtaacgccttgagggattcaggatgctggctggtggtgtccaccccgaccaatttcgactcaccgcccagggccgccacccattccgacagtgccccaccggcactcacccaacgttgtggcagttcagaggcttgcgccccgtggttgaccagcagtccgacaacaagcgcaatagcgctggtactcaggcgcataacagggtttccttccaagggcagggccgctcaagcactcatcaatgtgacagcaaacgcccgtctggcatcgtattgagcgcccggtcagctgacgggcgaagccggcatttgataattgtttgcatttgaacgtcaaggcacttaaggattgcaatgaagtttctctgcccctccaccgcactcgcgcccaacagcagcctcggttttgacatcgacgggtgcaagctgctggccgtgcgccgcgacggtgttgcgtacttctacatcaaccgttgcccccatcgtggcattccactggaatggcaacccgaccagtttctcgatgacagcgccagcctgatccaatgcgcgacccacggcgccctattcctgatcgagaacggcgaatgcatcgccggcccttgcgccgggcaaagcctgaccgccttgcgcggctgcgaagacgcccagggtctgtgggtggaactctagtcgagcagcacgtccaggcgtcggtccacacagatgtcttcgcaggtcacccgcacgccatacgctagcacttctacccccgccgccttggcttcacgcaaggcggcggcgtaacccgcgtcgatttccaccgcaggtcgcacggcctcaatccccgagagattgacgcagtacaactgcaccgcacgcacaccctcccgcgccagatgcgccagctcgcgcaaatgcttggcgccacgctgggtcaccgcatcgggaaacgccgcaaccgcagagccgtcaaagcccagcgtcacgcttttgacttcgacgtaggccgcaccgtcgggataatccaggcgaaagtcgatgcggcttttctcctggccgtaaggcacttcgcgtttcaacgcggtaaagccgttgagctcagtgatcacccctgcatgcagcgcctcctcgaccagttgattggcgcgcgccgtgttcacacaggccaaccgcccttggggcgtctcggcgatttcccaagtgccgggcaatttgcgcttggggtcattggagcgactgaaccagacttgtccgccttccaccatgcaattgagcatcgagcccgtgttggggcaatgaatagtcagcaactcaccggtaacggtctcgatatcggtgagaaaacgcttatagcggcgaatcaggcgcgcttcttcaaggggaggattaaagcgcatcagccttgccagctccgcagaccacgggcaatccgctccactgcttcttgtagccgattgaggttttgcgtgtaggcaaaacgcacatgatgaccggcttggtagcgaccgaagtccaggccaggcgtgaacgccacatgctcggtttcaaggaaatgacggcagaatgcgaaggcatcaccgccaaacgcgctgatatcggcatacaaatagaacgccccttcaggctcgaccgcgatgccaaaccccagctcgcgcaaagcgggcaacaggaagtcccgacggcgaccgaactcagcacggcgctcttccagaatgctcagggtttgtggggtgaaacacgccagcgcggcgtgttgggccatgcttggcgcgctgatgtagaggttttgcgccagcttctccaactcgcccactgccgccggcggcgccaccagccaacccaggcgccagccggtcatgccgaaatacttggaaaaactattcagaacgaaagcctcgtcgtcgacttccagcacgctggccgcgtcggtgccgtaagtaaggccatggtaaatctcatccaccaccaaatggccattacgcgccttgatggccgcagaaaggctagccaattcgtcacggctgaggatcgtcccggtcgggttggctggcgaggccaccagcgcgcccacactgtcctggtcccagtgcttggccaccaggtcggcggtcaactgatagcgcacctccgggccgaccggcaccaactgggccgcgccctctaccaggcgcaggaagtgacgattgcacgggtaaccagggtctgcgagcagccaatgcttgccagggtccaccagcaagctgctggccagcaacaatgcgcctgaaccgccgggggtgatcaggatacgctcggggtcgacgttcaacccgtagcgctgctgatagaaaccgctgatggcctcgcgcagttcaggcaggccacgggccgcggtgtagcgagtcttgccgttggctaatgcggcctggccggcctggatgatcggctcggcagtggtgaagtccggctcgccgatttccaggtggatcacatcatggccggcagcctgcagctcattggcccgcgccagcaatgccatgacatgaaaaggttcgatggcgcgactgcgcgcactgtagggctgggccattagccttccttaacggtgaggacaaaatctggattctaccgaacccacgccgtaaaacatgttctattgcctgcccgacagcagatgcagtccgggcaagcgcctgcaaaacgactaaaatctacattcgaggcaacacatacccagcaatggcgggctgtcgcagtttgcaaccgctttgccgtgggcctcgacaaccgggagtggcgcaccccgaatctatctggtaagttcgcccgcttgcagccgcagggccggcaggtgtcggtgacgttgcaatcctgcgcaatggattagaagagtgagaggcggtctattcatgtccacccaagcaaagcaacagcagactcaaggcctcaacggcttcgaaccttacgtagagacgaaaggtgaggagtacatgggcgagcccatgcgcgagcacttcaccaagatcctgaacaagtggaaacaggacttgatgcaggaggtcgaccgtacggttgaccatatgaaggacgaagcagccaacttccctgaccccgccgaccgtgcgagccaggaagaagaattcgcccttgaactgcgcgcacgtgatcgcgagcgcaagttgatcaagaagatcgacaagacgctgcagctgatcaaggacgaagaatacggctggtgcgaatcctgcggcgtcgagattggtattcgtcgcctggaagcccgcccaactgcggacctctgcgtagactgcaagaccttggccgaaatcaaggaaaaacaagtcggcaagtaatccagccgagctgaacgaatggggcgtacgaacgccccatttttgtttctggcgtttaccgaatttccagtagtatccggcccatgacagcctctacctatatcgggcgttttgcccccacgcccagcggccatttgcatttcggctcactggtcgccgccctcgcctcctacctcgacgcccgcgccaaccaaggccgctggctcatgcgtatggaagacctcgacccacctcgtgaagagcccggcgcccaggcagcgatcctgcatgcactggaaagttatggctttgaatgggacggcgaactggtccgacaaagcgaacggcacgaagcctacgccaaagtgctgaacgatatgttcaaccacggcctggcctacgcctgcacctgctcacgaaaacaattggaagcctacaacgggatctacccaggcctatgccgcaatgccggtcacgatcagcaggacgcggccatccgtctgcgtgttcctgagcttgcctaccactttaccgaccgcgtccagggcgaattccgacagcatctgggccgcgatgtaggcgatttcatcatccgtcgccgcgatggcctctatgcctatcaattggccgtggtcctcgacgatgcgtggcaaggtgttaccgacatcgtgcgcggcgccgacctgctcgactccacgccacgccagctctacctgcaggaactgctgggcctgcgccagccgcgctacctgcatgtgccactgatcgtccagccggacggtaacaaattgggcaagtcctaccgctccccaccgttgacacccgaccaggccacgcctttgctattaagggccctgcgcgccctcggccagcaacccggggaagaactcgagtacgcccacccacgggaactgctggactggggcatccagcactgggacgccacgcggataccgcgcacactcacgctggccgaagcgcaattgagctgaaggcgcttgcagcttgccaagcatccgttaccatcgccgcacgtttttacacagaggccaatatgtacatctatcgattggtcctgctgctggtcgtcgggatctacctgttttcccccgccatcatggattggtggatcgacgccacgggcgcctggtatcgcccttatctgctgtggttgatcctgatcgtcgtgactttcatcctgcagagccaaaaagatgccgatgagctttagcctcacccagatgctgctgatcagcgccgcctacctggccgcgttgttcggggtggcctggatcagtgagcgcggaatgattccgcgggcgatcattcgccatccgttgacctacaccttgtccctcggcgtctacgccagcgcgtgggcgttctatggcaccgtaggcctggcctatcaatacggttacggctttctctccagctacctcggggtgtccggcgcgtttctgctggcgccggtgctgctgtacccgatcctgaagatcacccgcacttaccagctgtcatccctggccgacctgttcgccttccgctttcgcagcacctgggccggcgcgctgaccacgattttcatgctgatcggcgttttgccgttgctggccctgcaaatccaggcagtagcggactccatcagcatcctgacccgcgaaccggtgcaacatcgggtcgccctggccttctgcgcgctgatcaccctgttcacgattttcttcggctcacgccatatcgccacccgcgaaaaacacgaaggcctggtgttcgcgattgcctttgagtcggtgatcaagctgatcgccatcggcggcgttggcctgtacgcgctttacggggtgttcgacggcccgcaacagctggaactgtggctattgcagaaccagaccgccctcgccgccctgcatacgccattgcaggaaggcccctggcgcacactgctgctggtgttcttcgcttcggcgatcgtgatgccgcacatgtaccacatgaccttcaccgagaacctcaacccgcgctcactggtcagcgccagctggggtttgccgttgtttctgctgttgatgagcctggcggtgccgctgatcctgtgggcaggcttaaaactgggtgccaccaccaaccctgagtatttcaccctgggcatcggcattgccgcgaacagcccggccttggcgctactcgcttatgtgggcgggttgtcagctgccagcgggctgatcatcgtgaccaccctggccctctcgggcatggcgctcaaccacctggtattgccgctgtaccaaccgccggccgagggcaatatctatcgctggctgaaatggacgcggcgcgcgttgatcgtcgcgatcatcatggccggctatggtttctacctgctgctgggcgcgggccaggacctggccaacctggggatcgtcgcatttgtcgccaccttgcagttcctgccgggcgtgctgtcggtcctgtactggccgacggccaatcggcgcggcttcatcgccgggctgctggcgggcatcctggtgtgggtcgtgaccatgctgctgccgctggtcggcaacctgcagggcttctacatcccgttactgaacatgatctacgtgctggatgacaccagttggcacatggccgcgattgcgtcattggccgccaacgtcttgatgttcaccctgatctcgctgttcaccaacgccagcccggaagaaaccagcgccgccgaagcctgtgcggtggacaacgtgcgccgcccgcaacggcgtgagttgcatgcggcctcaccccaggagttcgccacgcaactggccaagccgttaggtgccaaagccgcacaaaaggaagtcgagcaggcgctgcgcgatctctacctgccgttcgatgagcgccgcccgtacgcgctacggcgtctgcgtgaccgtatcgaagccaacctgtccggtttgatggggccgagcgtgtcccaggacatggtggaaaccttcctgccctacaaggccggcggtgaaaactacgtgaccgaagacatccatttcatcgaaagccggctggaggactaccactcgcgcctcacaggcctggccgccgaactcgatgccttgcgccgctaccaccgccagaccctgcaggaattacccatgggcgtatgctccctggccaaggatcaagagatcctgatgtggaacaaggccatggaagaactcaccggcatcgcggcgcaacgtgtggtcggctcacgcctcaacaccctcggcgagccgtggaaagaactgttgcaaggtttcatcaatctgcccgacgagcatttgcacaaacaacacctggccctcgacggccagacccgctggctcaacctgcacaaagccgcgatcgacgagccgctggcccccggcaacagcggcctggtgttgctggtggaagacctgaccgaaacccagatgctcgaagacaagctggtgcactccgagcgcctggcgagcatcggccggttggcggcgggcgtggcccatgaaatcggcaatccgatcaccggtatcgcctgcctggcgcagaacctgcgggaagagcgtgaagaagatggcgaaatcaccgagatcagcgggcagattctcgaacagaccaaacgtgtctcgcgcatcgtgcagtcgctgatgagctttgcccatgccggcgcccaccagaaccacgacgaagccgtgtgcctggccgaggtggcacaggacgccattgggctgctggccttgaaccggcgcaatttcgaagtacagttcttcaatttatgcgaccccgaccattgggtcgacggcgactcccaacgcctcgcccaagtgctgatcaacctgctgtccaacgcccgtgacgccaccccggccggcggtgccgtacgcgtcaagaccgaggctttcgaacatacggtcgatctgatcgtcgaagatgaaggcagcggtattccacagaacatcatggaccgattgttcgaacccttcttcaccaccaaggacccaggtgaaggtaccggtctgggccttgcactggtctattccatcgttgaagagcattatggacaaatcaccatcgacagcccggctgacaccgaaagccaacgcggcacccgtattcgggtgaccttgccgcgtcatgtcgaagcgacgtccgctgtgaactgagaccgtcgagagaattgaatcaatgccgcacattttgatcgtcgaagacgaaaccattatccgctctgccttgcgtcgcctgcttgaacgaaatcagtaccaggtcagcgaagccggctcggtgcaggaagcccaagagcgtttcagcattcccacgttcgacctgattgtcagtgacctgcgcctgcctggcgcgcctggcacagagttgatcaagcttggccagggcactccggtgctgatcatgaccagctacgccagcctgcggtcggcggtggactccatgaagatgggcgcggtggactacatcgccaagcccttcgaccatgacgagatgctccaggcagtggcccgtatcctgcgtgaccgccagtcggccagcagcacgccggccgagcaacgcccggcgggcaaaaccaatgacaagccaggcgtcgacaacagcaacggcgagatcggcatcatcggttcctgcccacccatgcaggacctgtacagcaagatccgcaaagtcgcgcccaccgactccaatgtcttgattcagggcgagtccggcaccggtaaagaactggtggcccgtgccctgcacaacctgtccaagcgcgccaaggcgccgatgatctcggtgaactgcgcagcgatccctgaatccctgatcgagtccgaactgttcggccacgaaaaaggcgcgtttaccggcgccagcgccgggcgtgcgggcctggtggaagcggcggacggcggcacgctgttcctcgacgagatcggcgaactgcctttggaagcccaggcgcggttactgcgtgtactgcaagaaggcgagattcgccgcgtgggttcggtgcaatcgcagaaggtcgatgttcgactgatcgctgctacccaccgagacttgaagagcctggccaagatcggccagttccgtgaggacttgtattaccgcctgcacgtgatcgccctcaaattgccggccctgcgtgagcgtggcgccgacgtcaatgagatcgccaacgcgttcctgcagcgccagagcgcgcgcatcaaccgaaccgacctgaagttcgctccggacgccgagcaagcgattcgccactactcgtggccaggtaacgtgcgggagctggaaaatgcggtcgagcgagcggtgatcctgtcggagagcccggagatttccgccgagctgctgggcatcgacattgagctgagcgatctggaagacgatgacttcatcggcctggccccccaacagggcggcggtagcaacaccagccatgagccgacggaagatctgtcattggaagactacttccagcacttcgtccttgagcatcaggaccacatgaccgagaccgaactggcgcgcaagctgggcgtgagccgtaaatgcctgtgggaacgtcgccagcgcctgggcattccacggcgtaagaccggcgtgaccagcgagagttgagggggcgccctcacaggtaacacccgcagatgtgaaaaaactgttaccgcggatatttcgcgtaacaaaagccggggcttacggtaacgaagccccggctttttttggtccgtcaaaaacccgaaaccacctcaacccccaggttttgctgggcggtgcaaaagttggcacgcaccctgctatatgcttagtacaaaaacaataacaagctttgtacaagacaataaaaataagacgaatcgactcacgcataacaaaaacaacacggcggaggcgcagctaactgattcttttggagaggcgttgcatttggggcttgccccgcaaccaggccgagaacaacaaaaactgccctaaggcagagcctgaactggttggatcgtagatcagcaacacagcgaccaaagcaatccgtttgctcttgactcccgattgggagtgtcatgaaggtgaagcttcatggcgagggcgatcaacaaaaacaagaagcccgcaacccataataaaaatagagcacgcaactacttctgggggagcttcggctccccttgtagtttccgcgatttgaccgtccagcaacctcttgaagcttttggcttggggcttgcagcttgttcctacaccatcccctgactaaatgctagaatccccgcccatcatgcggtcattcttcgttatggccgaacattccttcaaacagtgcatcccatgctgaagaagttgttccagtcattccgttctcccttgcgtcgtacgcaacacaaacgcagcacgcctgaagtgctcaacagcagccagcattcgctgcaacgcgctcaattcagccgttatgcggtgaatatcgtcgaacgtttgcagaacgccggctaccaggcttatctggtgggcggttgtgtacgcgacatgctgctcaatatcacgcccaaggacttcgacgtcgccaccagcgccacgcctgagcaggtgcgtgccgaattccgcaatgcgcggatcatcggtcggcgtttcaagctggtgcatatccacttcggtcgcgaaatcatcgaagttgcaacgttccgcgccggccacccgcaaaacgatgaagaggaagacaccaaccagtcctcacgtaacgaaagcgggcgcatcctgcgcgacaacgtctatggcaccctggaagaagacgcgcagcgccgcgacttcaccatcaatgccttgtattacgacccggtcagcgagcgcattctcgactacgccaatggcgtacacgatattcgcaacaacctgatccgcctgatcggcgacccggtccagcgctaccaggaagacccggtgcgcatgctgcgagcagtgcgttttgccgccaagctcaacttcggcattgagcgccacaccgccgcgccgattcgcgaactggcaccgatgctgcgcgaaattccctcggcccgcctgttcgaagaagtgttgaagctgttcctctcgggctatgccgccgacaccttcgaaatgctcgtcgacctgcagttgttcgacccgctgttcccggccagcgccgaggcgttggaatacaacccgacgtacacccacaccttgatcagcgaagcgctgatcaataccgacctgcgcatcaagcagaacaaaccggtaaccccggcgttcctgtttgccgcgctgttgtggccggcgttgccaaaacgcgtactgcgcttgcaggagcgtgggatgccgccgatcccggccatgcaggaagccgcccatgagctgattgccgagcagtgccagcgcatcgccattccaaaacgcttcaccatgccgatccgtgagatctgggacatgcaggaacgcctgccacgccgcagcggcaaacgtgccgatctgttgctggacaacccgcgtttccgtgccggctacgacttcctgctgttgcgtgaaagcgccggcgagcagaccgacggcctgggcgaatggtggaccgactaccaggacgccaatgacagcgaacgccgcgacatgatccgtgacctcggcagcaaaggcgatggtgaaggcaccgggccgaaaaaacgtcgccgcagcagcagcaagcgcaagcgtagcgcggccgacgccccgggcgaataaacgtggagcgcatctacattggcatgggcagcaacctggctgccccggatcagcaattgcgcagcgctatcgaagcgctggcgcaattgcccgacacccacgtcgccggggtctctgccttctatcaaagtgactcactgctccctgggcagccgcgctacaccaatgcggtggcagccctggacagcaatcttgcgccgcttgatttgctggatgcgctgcaagccatcgagaacgaccagggccgcgaacgccttgagcgttggggcccacgcacgctcgacctggacatcctgctgtttggcgatcgactgatcgatgagccgcgcctcaaggtgccgcactaccagatgcacctcagggcgtttgtgctgtacccgttggccgaactggcgcccgccagcctggccttacccgatggtcaaaccctccacgacctgcttgaagcctgcccgtttgtcggtcttgaacgcctcaccgttgctgaatcgcgtcagtaacagcggtaacaccgtcatcgtaacaatgcggtaacacatccaattgacttcccgtgtcctcctcacgactataggcgtcccgctgccgccaacccggcgctgaagggcgcaatccaggccttataagcactgctctcaagacagtgcgcctgtataaacgaagactcacgcgcgttactcgctgtttccaagcgcctgaacgaggacccttttcatgccagacattaccctgaccaccttgcagagcctcaagctcaaaggtgaaaaaatcaccatgctgacctgctacgacgccacgttcgcccacgccagttgccaggccggggttgaagtgctgctggtgggcgactccctgggcatggttcttcaagggaatgacagcaccctgcccgtcaccaccgatgaacttgcgtaccacactgccagcgtcaagcgcggtaacgatggcgccttcatcatcgctgacctaccgttcatgggttacgcgacactcgaacagacctttcagaatgccggcaaactgatgcaagccggtgcgcacatgatcaaagtcgaaggcgcggtgtggcttgccgagtcgatccgcctgctcgcggagcgtggcgtgccggtgtgtgcgcacatgggcctgacgccgcagtcggtgaacatcctcggcggctacaaggtacagggccgcaatgaggcccaggcgcgccagatgcgcgcggacgccatcgcgctggaacaggccggcgcggccatgatcctgctcgaatgtgtgccgagcgagttggcggcagaaatcacccaggccgtgaaagtgccggtgatcggtatcggcgcgggttcggccaccgatggccaggtgctggtggtgcacgacatgctcggtctgtcgatcagcggccgcgtgccgaagttcgtgaagaacttcatggccggccagaccagcatccatgacgccttgagcgcttacgtcgccgaagtcaaaggcgtgaccttcccggccgccgaacatgggttctctgcatgaacaccgttaaaaccgtacgtgaactgcgggctgccgtgacgcatgcccgcagcgccggcaagcgcatcggctttgtgcccaccatgggcaacctgcacagcggtcatgccaccctggtgaccaaggccgcccagcaagcggatttcgtggtcgccagcatcttcgtcaacccactgcaatttggcgccggcgaagacttggacaaatacccgcgcaccctggccgccgatcaggaaaagctgctgcaggccggatgcaatctgttgttcgcacctaccgtcgaggaaatgtaccccggcggcatgaccggccagacccgtgtcagcgtgccgcaactgtccgaaggcctgtgcggcgccagccgtcccgggcatttcgaaggcgtggcgacggtggtcagcaagctgttcaacatggtgcagccggacatggcggtgtttggccagaaggactatcagcaactggccgtgatccgcgccatggtgcatgacctgaacatgccgatccagatcatcggcgagcccaccgtgcgcgccgacgacggcctcgcgttgtcgtcgcgcaacggctacctcaccgaagagcaacgcgccatcgcgccggtgctgtaccgcagcctcagccagatcggcgctgcgatcaagaccggtgaccatgacttcgccaagctgcgcgccgaacaggtccgccagatcgaagccgccgggttgcgtctggactacctcgaagtgcgccagggcgtgcatttgcgcccggcaacggcagaagatcgggatatcgtgatccttgtggcagcctacctgggggccacgcgcctcatcgataacctgcatctgaccctcgcctgaccgccctcaacgtgccctgcttgttgtgtaaatagaaagtgccggtataaaaaagtaccggcatgagcgcagacaaagccaagacatatcgacacgctaggtttaatgtaatcgccctgcgctatggttagcgctgtctggaacccattgctcgatcaaagactggatgttccaggcaaataagtgtcctaaaggcagtccccgtaataaaaggaaacccgcagcgatggcgtactaccgcacccctcatgacgttaccgctctgcccgcctggcaagcgctcaatcaacatcgccaagccatgcaggatttcagcatgcgcgaagcgttcaatgccgatcctcagcgtttttcccagttcaccctgagcagctgcggacttttcctcgattactcgaaaaacctgatcaccagcgaaacccgtgacctgctggtaaacctcgccaaagaggttcacctcaaggacgcgatcgacgcgctgtacaaaggcgagccggtcaattcttccgaaggccgcccggcgctgcacaccgccctgcgccgcccggtgggtgacaagctgtcggtcaacggcgtgaatatcatgccggacgtgcacaaggtgctgaaccagatcaccgacctggtcggccgcatccatgacggcctatggcgtggctacaccgagaagccgatcaccgacgtggtgaacatcggtatcggtggctcgttcctcggcccggagctggtctccgaggcgctgttgtcctacgcccataaaggcgtgcgctgccattacctggcgaacatcgacggcagcgagttccacgagctgaccatgaagctgcgcgctgaaaccacgctgttcatcgtctcgtcgaaatccttcaacaccctggaaaccctgaaaaacgcccaggccgcccgcgcctggtacctggcccagggtggctcggaagccgagctgtaccgccacttcatcgccgtgtcgagcaacaatgcggcggccgtggccttcggtatccgcgaagaaaacatcttcccgatgtgggattgggtcggcggtcgttactcgctgtggtcggccatcgggctgcccatcgccctggccatcggcatgtccaacttcaaggaactgctgtccggcgcctacaccatggaccagcatttccagaacgccccgttcgaacagaacatgccggtgctgctcggcctgctgggcgtgtggtacggcaacttctggggcgcgcagagccacgcgatcctgccgtacgaccactacctgcgtaacatcaccaaacacttgcaacagctggacatggaatccaacggcaagagcgtgcgccaggacggtacgcccgtcgccactgataccggcccggtgatctggggtggcgtgggttgcaacggccagcacgcttaccaccagttgctgcaccaggggacccaactgatcccggccgacttcatcgtgccgatcgtcagcttcaacccggtgtccgaccaccaccaatggctgtacgccaactgcctgtcccaaagccaggcactgatgctcggcaagacccgcaccgaagcggaagccgagctgcgcgacaaaggcatcccggaagacgaagtgcagaagctggcaccgcacaaggtgatcccgggcaaccgtccgagcaacaccctcgtggttgaacgcatcagcccgcgtcgcctgggcgccctggtggccatgtacgagcacaaagtgttcgtacagagcgtgatctggggtatcaacgccttcgaccaatggggtgtggaactgggcaaggagctgggcaagggcgtctacaaccgcctgaccggcgccgaagaaacctcggccgaggacgcttcgacccagggcctgatcaactacttccgcggtcgtcaccgcggctgatccaggtattgcaaggccaacgtccgtttggacgttggccttgaaccctccccctgctgggtgcatctttatgacttgtggctaaaacaagaataaggatcgctcatgttcgatatcagcacgttccccaccgccgatgccgtccgccgggctgcgcaactcagtcaagaggactatcagcgcctctaccgccaatccatcgatcagccggacaccttctgggctgaacaggccaaacgctttctcgactggataaccccctggcacactgttcaacgctcagacatccacaccggcgccgcccaatggtttgccggtggccagttgaacgtcagctacaactgcatcgaccgtcacctggcgcaacgcgccgatcagccggccttcatctgggaaggcgatgatccgacaaaatcttccaaaatcacctaccgccagttgcaccagaacgtcggccgcctggccaatgtgctgaaaagccgtggggtgaagaaaggcgaccgcgtgtgcatctacatgccgatgatcccggaggccgcctacgccatgctcgcttgcacgcggattggcgcggtgcactccgtggtatttggtggtttctcgccggatgccctgcgcgaccgtattctcgacgccgactgccgcacggtaatcaccgctgacgaaggcgtgcgcggcggcaagcccgttgcactgaagcagaatgtcgacaaggccctggccagttgcccgaatgtgggtacggtactggtagtggaacgcaccggagcgaccgttaactggagcgaaggccgcgacctcaagtatcaacaagccctggacgccgccagcgacgactgcccgcccgagccgatggacgccgaagacccgctgttcatcctctacacctccggcagcaccggcaaacccaagggcgtgctgcacaccaccggcggctacctgctgcaagcggcgatgaccttcaagtacgtgctcgattaccgcgacggcgaagtgttctggtgcaccgccgatgtgggctgggtcaccggccacagttacatcgtgtacggcccgctggccaatggcgcgacctcgctaatgttcgaaggcgtgccgagctacccggacagttcgcgcttctggcaggtgatcgacaagcaccaggtcaacatcttctacaccgcgcccaccgccctgcgcgcgctgatgcgcgaaggccatggcccgctggaaaatacctcccgcgccagcctgcgcctgctgggcagtgtcggcgaaccgatcaacccggaggcctgggactggtacttcaatgccgtgggcgaacaacgctgcccgattgtcgatacctggtggcagaccgagaccggcggcatcatgctcagcccactggtcagcgcccagcgcatcaagcctgggtgcgcgacccagcctatgtttggcgtacagccggtactgctcgatgaacaaggcaaggaattcagcggcgccggcagtggcgtgctggtgatcaaagccagctggccggggcagatccgcagtgtgtacggcgatccgcagcgcatggtcgacacctatttcaaaccctaccccggctactatttcaccggtgacggcgcccgccgcgatgaagacggcgactactggatcaccgggcgcatcgacgatgtgatcaacgtgtccggccatcgcatcggcactgccgaggtggaaagcgcgctggtgctgcacgaccaggtggccgaggccgccgtggtgggctacccccatgatgtcaaaggccagggcatctatgcctttgtcacccccatgaatggcgtggaacccagcgatgcgttaaaaaaacacctgctggacctggtcagcaaagaaattggcagcttcgccaagccggaactgatccaatgggctccggccttgccgaaaacccgttccggcaagatcatgcgcaggattttgcgcaagattgcctgcaacgagctggacagcctgggtgacacttcgaccctggccgatccgagcgtagtggacggcttgatcgacaagcgcctgaaccgataggaaccccttgagtcgccatggaatttatccgcagccgtatcgaaacccagctgatgagcctgaccggcctgtcgctgggccaactggacctggaaaaccccaagggcgacccaggcctgttcgggcccgactcggtgagttggcaagtacatggcgacttcagcagcatgctcatcggcggcatcagcgccttgatgctgcaagccttgcacccgctggccctggccggggtgtgggaccactcgaactttcgccaggacatgcttgggcgcttgcggcggacctcgcagttcatttcgggtacgacattcggctcgcgcaaagacgccgaatggctgatcgaaaaagtccgcaccattcacctgcaggtggtcggccacgcgccggatggtcgcccctatgcggccagcgacccggagctgctgacctgggtgcatgtggcggaagtcagtaacttcctggccgcccacttgcgttaccgcaacccgcacctgtccggtcgcgaccaggaccgttactacagtgaaattgccttggtcgctgaacggctgggtgcacggcatgttccgcgctctcggcaggaagtttcggattatctgacacgcatccgcccgcaattgctgtgcgacgatcgcagccgcgaagtgctgcgattactgctgaatgccccctcacccagcctgctggccaagccatttggcagcttgatgatgcgcgcggggatcgacctgctgccggattgggccagcgccatgctcgaccagcaccagagcccgctgcaacgccagatgatccgtgccggcgtcaagcgcagtgcgccgatgctgcgctgggcgatgcgcaatggttcggtgcaacgcgcccatcgccggatggggttgatgtaggtgacggcgcatagctgttaaacttcgcgccctcaatttcccagcaaggcgcgctccatgtcttccctgaatcaggcgctgcgcgccgccctcgatcatcgccaagacctgatcagcgaactgcatgcccaggccaccgactgttaccggctgttccatggcagccaggaaggcgccggcggcctgaccatcgaccgctacggtccccaattgctggtgcagagtttccaccaatccctggaaaccgccgacctgctggacctgcatcaacaggtcaaccagtacatgggcctggagttgttgctggtgtacaacgatcgcgcccgtggcaattcgcgcattgaccgcgaagacacggtgtatcgcgccgaacccgccgcactggaggacctggttggccacgagtggggcctcagttaccgcgtacgtgggcggcatgccgggcaggacccgctgctgttcctcgacctgcgtaacacccggggctgggtcaaggcccacagcgccggcaaaagcgtgctcaacctgttcgcctacacctgcggcgtgggcctgagcgcagccgccggtggcgcccgtgaggtgtgcaacctggacttcgccgagggcaacctggcggtgggtcgcgaaaacggtttgctgaacccgcaattgccgagcatggagttcgtacagtccgactacttcccggcgattcgtcaattggcgggtctgccgatcacccagcgtcgtgggcaaaagctgccgagttatccgcgcctggagcaacgtcaatacgacctggtgttgctggatccaccggcctgggccaagagcgcgttcggcaccgtcgacctgctgcgcgactaccagagcctgctcaagcctgcactactggcgaccgccgacaatggcgtgctgatctgctgcaacaacctggcgaaagtcagcatggaggattggcgcgaacaggtactgcgttgtgcagaaaaagccgggcgtccggtgcgtgactggcaaatcatgacgcctggagcggacttcccgtcccaggatcagcaaccgcccctgaaaaccctgatacttcagctgtaagaggtttctcaaaggcccttgctcttcggaaccgaaaacccgtgccatactccaaggcactcctgtttgacatagatggcgccgccccatgcccaaaggattgattcgcgccgctggcgccttgttgactgcccttgccctgtacagcttgctgggctttttgattctccccggcatcgcccttcgcatcgccaaccagcagttggccaattacgccacggtgccggcgcggatcgagcgaatcgagctcaacccgttcagcctggagttgaccctgtggggcctgaagatcggcgaacccggcaaggagcaagtcgggttcgaacgcctctacgccaacctgcagatcgacagcctctggacccgtgccctgcacctggccgacgtacagctggacaagcccaagaccgaattgctcttcgacaagtccggccaactcaacctggcgcagttgttcaagctgccgcccagcgagccaacaccggccaatcccgatgccaaaccgttccctttgcgtatcgacagcatcaagctggccggtggttatgtgcacttcgaggacttgcgccccagcgagcccatcgaattcctctacgacacactcgacttcgagctgaagaacctcagcacactgcctgaagacaatgccgacatgaccctggtcgcagctggcccggcaggtggacagatcgactggaaaggcaatttcagcctggtgccgatcacctccgaaggtacgttgaaagtcaccaacggcaagatgaaagcctggtggccctatgtacgtgacgcactgccactggtgcttgaagacggcgtgctcaacttcagcaccgagtacaaattcagcctggccaaagagaccgagctgaacctgaccaacaccgccgccagcatcgcgccctttgccatcaaggcaccggacggccgcccattggtacgcctggaacgcctggacgtcagcgagaccacggtggacctggccaagcagcacgtggtggtcggcaagatccgcagcaacaaactggaaacctgggcggcccttgaggccgacgggcaactggactggcagaaactgttcgccagccagccgagcaaaccggccaaggcgccggaaccgaaaaacgcacccgccaccgccgactcgccaaaagccgaacctgccgcgcccagcaaaccctggcaagtgctgctcaaggacgtgcaactgcgtaactatcaggtgcacctggctgaccgccaggccaagccggcggtagcgctggaactcggcccgctgaacgtcgacctgcagaatttcgacagcctcaaccagagcccgtttaccttgaaggtcgactccggcgtgggcaagcaaggcaagctccaggcgaccggcgaggtcaacctcaacccggtcagtgccaagcttaaagtgaacacccaggacatcgacctgcgggtggcccagtcctacatcagcccgttcatccgcctggaactgcgcagcggcatgctcggcagcaatctggatgtgaacctgaaaagcactgatcctctgaagcttcaggtcaccggccgtgcgcaggtcgaccaattgcacaccctggacaccctcaaaacccgcgacttcctcaaatggcagcggctggtgctcgaaggcgtgaactaccagcacggcgacagcctgtcgatcgacaaggtcaacctgctgcagccgtatgcgcgcttcatgatcaacgatgaccgcaccaccaacgttgatgacctgctgattccgcaagcgcccgacaaaggtcccaagcccgccagcaaggacaagcccttgggcattcgcatcgggcagattgcgatcaatgacggctcggccaattttgccgacttcagcctcacacccaacttcgccaccgcgattcaacagctcaacgggcagatcggcaccatcgacagccgccaggccaaaccggccagcgtcgacatcaagggcaaggttgatcgctatgcaccggtgaccatcaagggcagcgtgaacccgttcgacccgatggcggcgctggacattgcgaccagcttcaaacgtgtcgaactgaccaccctgacgccttattccggcaagttcgccggcttccgtatccgcaagggccgcctgaacctcgacctgcactacgtcatcaccaagggccagttgaaggccgagaacaaagtggtggttgagcaactgcaactgggcgagaaagtcgacagcgccgacgccgtggacttgccgattcgcctggccgtcgctttgctcaaggacagtgacggcaagatctccatcgaactgccggtcaccggtgacttgaacaacccgcaattcagtgtgatgccgatcgtctggcagaccctgcgtaacctggtagtgcgcgcggcaacggcgcccttcaagtttatcggtgggctggtgacgggcggcggctcggaagacctcggcaatgtgtcgttcgccccaggctcaagcgaattgaacaaggatgcggaaggcgccctgaacacgttggctaaagcacttaaggaacgccctaccctgcgcctggaaatcgaaggcacagcggcggccagcagcgatgggccattcctcgctgcccagcgactggagcgtgaataccagtacaactactacaagattcttcagcgtcgtggcgacaaagtacccgcccaggcctcgttgcttgtcgtacccgagaaggaaaaagcgccgttgctggaaggcatctaccgcacccgcctgaaagaacaaccgccggccgagtggaaggacctgagcagcgatgaccgcagcgcgaagctgcgcgacggcgtgatcaagttctggagtggcagtgacgtgctgctacgccaacttggccaggaccgtgccagcaccatcaaggactacctggtggataagggccagctggaagatgatcgggtgtacttcatcgatgccaacctgggccaggctgagaaagatggtcgggtggtcacgccaatgcatctggatgccgagtaacgtctgagcagcactatccaaatgtgggagtgggcttgctcgctcccacatttaatcttcatctgcccttcacagatattccgacccacaatagaacaggccccgacacaagtgccggggcctgtaatgaccacatccgtgtggtcggtcgcatgaactccagaggtgcatttgggtggatatctaactcaccctaagccgccgccgtccagttcagacgaaaacggtgcgttttactctgctttcaggccatcggccgatacagctttaacgcctttgattttcttggtgatgttcaccgcggtagttttctgagcttcagtaaccggagcggtcgaagacagggacactacgcctttgttggtttcgactttaatgtcggtaccaggaatgcctttctcggtaaccaggtcagcttttactttggtggtgatccaagtgtccgaggtggactctttggcaccagccgctgcgcttttggttttgtcgatgttgtcagccttggtagcgccgccagccatcaggccgtcagcagaaacagcagttacacctttgattttcttggtgatggctacagcagtggctttttgcgaatcggagatcgcaacggtcgaggacagggaaaccacgcctttgttggtttctaccttgatgtccgaaccaggaatgcctttttcggtcagcaggtcagctttgactttggtggtgatccaagtgtccgaagtggtttctttagccttggtgacttcaccggcggccaaggtcattggagcttgggaagtctgggcaaaggccacgttagcacccatggccagggtcagagcggtagcagtagcgagagcgaacttcttcatacgagtaactcctgttttattgaaagtctgcagtgtgtgaaccttgatgctgcagcgttaacagggttattgcaggcagtgtgccaagtctgcataagcaattaaatcctttacaaacaatgacttataaaaaacatgaaaattcggattcgtgcaacttgcatgatgccgtctgagcctgcatgcaagttgcggcttttgctttgtattaagcgcctgatttttaggtattttcctgctcccataaaaaaaggactccgaagagtcctcttttcagcgtgaagcctgggggtgattaaacgcccgaagccttggctgctgctacgtccttgatggacagcttgatacggccgcggttgtccacgtccagtaccagcacttccacttcctggccttccttcagaatgtcggtgactttctcaacgcgagcgtcgctcagcatggagatgtgcaccagaccgtctttgcccggcaggatgttgacgaatgcgccgaagtcgacgatgcgctcaaccttaccgacgtagatcttgccgatctctgcctcggcagtgatgcccaggacgcgctgacgtgctgcttcagccgcttccttggtttcgccgaagatcttgatcgagccgtcgtcttcgatgtcgatcgaagccttggtctcttcgcagatcgcacggatggtcgcgccgcctttaccgataacatcacggattttgtcggtgtcgattttcatcgcgatcatggtcggagcattttccgacagttcggtacgggactgaccaatgatctggttcatctgaccgaggatgttcaggcgcgcttccagggcttggcccagggcgatttccatgatctcttcggtgatgcccttgatcttgatgtccatctgcagcgcggtcacacctttggcggtaccggctaccttgaagtccatgtcacccaggtggtcttcgtcgcccaggatgtcggtcaggatggcgaacttctcgccttctttaaccagacccatggcgataccggcaaccggcgccttcatcggtacaccagcatccatcagtgccagggacgcaccgcaaacggaagccatggagctggaaccgttggattcggtgatttccgatacgacgcggatggtgtacgggaacacgtcagcggcaggcagcatggcctggaccgaacggcgggccagacggccgtgaccgatttcgcgacgaccagcgccacccatgcgaccacactcgcccaccgagaacggagggaagttgtagtgcagcatgaacgggtcttttttctcgccttccagggtgtccagcagttgtgcgtcacgggcggtacccagggtcgcaacgaccagagcctgtgtttcaccacgggtgaacagagccgaaccgtgagtcttcggcagaacgccgacttcaatgttcagcggacgtacggtgcgagtgtcacgaccgtcgatacgtggcttgccgttaacgatgttttcgcgaacggtgcggtattcgatttcgccgaacgccgcttttacttcgctggaggaaggctgaccttcttcaccggacagcttggccacaacctggtccttcaactcgcccaggcgcgcgtaacggtcggccttgacggtgatggtgtaggcgtcggagatggcagcgccgaactcggagcggatagcgcccagcagttcagtggcttcagcctgtggagcccaggtccaggttggcttggcagcttcggcagccagttcggtgacagccttgatgacagcctggaactcgtcgtgggcgaacagtacagcgcccagcatctggtcttcggtcagctctttggcttccgattcaaccatcagtacggcttccgaggtaccggcaacgaccatgtccaggctcgatgctttcagttgctcgtaagtcgggttcagcaggtagccggtgctttcgtggaacgcaacgcgcgctgcgccgatcgggccatcgaaaggaataccggagatggccagggccgccgaggtaccgatcatcgcagcgatgtccggatcggttttcttgctggtggaaacgacggtgcagacaacctgcacttcgttcatgaagccttctgggaacagcggacggatcggacggtcgatcagtcgggaagtcagggtttctttctcggaaggacggccttcgcgcttgaagaaaccgccagggatcttaccggcagcgtaagttttttcctggtagtgaacggacagagggaagaagcctttgctcgggtcagcggtcttggcgccaacaacggtcaccagtacggtaacgtcgtcatcaacggtaaccagcactgcgccggaggcttgacgggcgatacggcctgtctcgagggtaacggtcgactgaccgaactggaattttttgataaccgggttcacggtgtcctaccttctttgtggctcttggggaacttgtcttcttgcgaaattcttgggcaatgccgggaatcggcccgacgctcgtccagggtaaaacgtgtatccagataaaacttgaggctgggagcctgccatggaccagcggaaatcccactggcacacggcagacaaccaacctctagcgcaatcgcttattagcgacgcagacccaggcgaccgatcagagtctgataacgacccagatccttgcctttcaggtagtccagcagcttacggcgctggtttaccatgcggatcagaccacgacgcgagtggtggtctttaccgttggccttgaagtgaccttgcagcttgttgatgttgtgggtcagcagtgcaacttgcacttctggcgaaccagtgtcaccaacagcttgctgatagtcagcaacgatttgtgctttttcttgaacgtcgagagccatgaggcaatcctttttttcaggaaaccacccaaagggcagtttcaacaggccagggacaaatccctgtatctaaaaatgagtagtgaccgtgcctgttaacagccaccctcgttcggtcattctgaccgaatcagtcgacgtggcgctatacgcccgtcttcgctcacttcaccgataccgataaagcgaccgttatgatcctgtactcgcaccatgccgaacttcggggcatccggggcacgtaccggctggccgttgagccagtagaacgcgctgtgctccgagaagtgcagcaatggccaatcgagcaaaccgctgtccgatggcatcaggaagcgatcaactgcttcattgccgccttcggcgtgtaccgcttccaactcttccaacgtgaccgtctgggccaggctgaaaggaccggcctgggtgcgtcgcagttctgcaacgtacgcgccgcaaccgagcttttcaccaatatcttccaccagggtacggatataggtgcctttgctgcagtccacggccaaccgggcggtgtcgccttcacaggcgagcaattccaagcgcgcaatagtaacagaacgcggttcgcgctccactacttcgcccgcacgtgccagcttgtaaaggggttgtccgtcacgcttgagcgccgagtacatcggcggtatctgactgatttccccacgaaaagcgggtaaagccgcttcaatatcagcacgaccaacggtcacgtcgcgaacctgcaaaacatcaccttcggcgtcggccgtggtggtggtcttgcccagttgcatcagggtttcataacccttgtcggaatcgagcaggtattgggagaacttggtggcctcgccaaagcacaacggcaacacgccggtggccaggggatcgaggctgccggtgtgcccggctttctcggcattgagcagccagcggaccttctgcaacgcggcattggaggtaaagccaatgggtttgtcgagcagaatgatgccgctgacgttgcgacggatacgtttgacctgagccaccgcttactccttggcgtcttcaggtgtggacgggtgctggctgtcttcagccacggcgcgctcgatcagggccgacaggtgtgcaccccgcacgacgctttcgtcgtagtggaagtgcagctggggcacgctgcgcagcttcatttcacgggccaactgcatgcgcaggaaacctgcagccgagttgagcaccttgatgctttgcgcgatttcttcgctgctgtcctgccccatcacggtgatgaagatcttggcgtgacccacgtcacggctcacttcaacggcggtgatggtgaccaggccaacgcgtgggtctttgacttcgcgacggatcagttgggccagctcgcgctgcatctgatcgccgatacgctgggtacggctgtattcttttgccatgtcttgttacctgttactgccacacggtgaaacccgtggggtctgaaagcggcaaacgcccggcctgacaaaagccagaccgggcgttgcgtttagagtccgtacgctgcgcggggcatttgcatgcccacgcgctgcgtggctcctgaagtgcgcgagttagaggctgcgagcaacctgaaccttctcgtagacttcgatcttgtcaccagccttgacgtcgttgtagctcttgacgccgataccgcattccatgccggcacgtacttcagaagcgtcatccttgaagcggcgcagggattccagctcgccttcgaagataacgatgtcttcacgcagtacacggattggacggttacggtacacggtgccttcaaccaccatgcagccggcgatcgcgccgaacttcggcgagcggaacacgtcacgtacttcggcgatacccaggatgttctcccggacgtcgctgccaagcatgccggtgagggctttcttgacgtcttcgatgatgtcgtagatgacgttgtagtaacgcatgtccaggccttcctgctcgacgatcttgcgagcgccggcatcggcacgcacgttgaagccgaacagtacagcgttggaagccagtgccaggttggcgtcggactcggtgataccaccgacaccgccaccgacaacgcgcacttgcacttcgtcgttacccaggccgttcaaggcgccgttcaacgcttcgagggaaccacgtacgtcagatttgaggacgatgttaagcgtcttcttctcttcctggcccatgttctcgaagatgttttccagcttgccggcgtgagcacgggccagcttgacttcacggaacttgccttgacggaacagagccacttcacgggctttcttctcgtcggctaccacgctcatctcgtcgccagcgtccggagtaccgtccaggccaaggatctcgaccgggatagcaggacctgcttccttgattggcttgccgttctcgtcgagcatggcacgtacacggccgtagttcgaaccgaccagcaccatgtcgccttggcgaagggtaccgtcttgaaccagaacggtcgcaaccgggccacggcccttgtcgagacgggattcaaccacaacaccacggccaggagccgatggcgtagcagtcagttccagaacttcggcttgcagcagaacggcttcgagcagttcgtcaacaccagtacccatcttcgcggagaccggtacgaatggagtgtcgccaccccactcttcggatgtcacgccgtgaaccgacagttcgctacggatgcgatcaagatcggcgcccggcttgtcgattttgttcacagcgactaccaacggaacgccagctgccttggcatgctgaacggcttcgatggtttgtggcatcacgccgtcgtccgctgcaaccaccaggatcacgatgtcggtcgccttggcaccacgggcacgcattgcggtaaacgcagcgtgaccaggggtgtcgaggaacgtcaccatgccacggtcagtttcaacgtggtaagcgccgatgtgctgggtgataccgccggcttcgcctgcggctaccttggcacgacggatatagtcgagcagggaagttttaccgtggtcaacgtggcccattacggtcacaaccggtgcacgggaaactgcctcaccttcaaacttcagggactcggccagggaatcttccagggcggtgtcgctgaccagggtcactttgtggcccaattcttcagcaacaagctgggcagtttcctgatccagtacctggttgatggtggccggagtgcccagcttgaacatgaacttgatgatttcagcagccttgaccgacatctgctgggccagatcgcccacagtgatggtctcgccgatcttcacttcacgcacgacagggccggttgggctctggaaaccgtgggcgttgcgtttcttcagcttggccttgccgcgaccaccacgacggaagccatcgctttcttcgtcggtagtgcgtggggcaacgcgtggcgcaggcgctttctctttgaccgaggcacgatgcggagcgtttttgcgctcgccatcgccaccaccaccgcgacgattgttatcgtcggcacgcggtttgtccggacgacgaggttcgtcgcgcttgcgagcgtcagcagccggtgctggtgcagcggcaaccggagcggcctcacgcacagcttcaactggcgcgctaggcgcagcgaccgcttcagtggcagcaggttgcgcagcagcaggctggcgacgcgcttcttcttcggcgcgacgcttggcttcttcttcagccttctgacgagcagcattttctactgcgcgacgttcttccagttcgcgtttgcgctcggcttcgatttcttccgggctgcgctgtacgaagactttcttcttgcgtacttcaacgctgatgctcttgctaccagcaacacgcagggtgctggtggttttgcgctgcaatgtaatcttgcgcggttcttccactttcgccttgtggctgctcttcaagtgagtcagcaaagactgcttctcactatcgctcacaccttcatcggcggcggtgtgcggcagacctgcctcacgcatctgctgcaacaggcgctctaccggtgttttgacctcatcggccagttgtttcaccgtgacttgcgtcatgcacttctctcctcaggccgcgcctagttactcgaaccaatgggctcgggcggccatgatcaacttgccggcacgatcatcgtcaatgccgtcgatgtcgagcagatcgtcaatagactgctcggccaggtcttcgcgggtaattacgccgcgcaccgccagttccatcgccaaatccttgtccataccctcaagcgagagcaggtcttcggccggatgggcgtctgccagcttttcctcagtagcgatggctttagtcaacaaacgatccttggcccgagcgcgaagctcgttgacggtgtcttcgtcaaagccgtcgatgttgagcatttcttccaacggtacgtaggcaatctcttccaggctggtgaagccttcatctaccagcacctgcgccaggtcttcatcgacttccaactcttcgatgaagttgcgcaggatgtcaccggtttcagcttgctgcttagcctggatgtccgattcggtcatcacgttcagggtccaaccggtcagttggctggccagacgcacgttctgaccaccacgaccaatggcctgagccagattgtctgcgccaacggcgatgtccattgcatgggcatcctcgtcaacgataattgccgccacttcagccggcgacatggcgttgatcacgaactgcgccgggttatcgtcccacaggacgatgtccacacgctcgccacccaactcgcccgacaccgcctggacgcgcgaaccgcgcataccaatgcaagcgccttgcgggtcgatgcgtttgtccttggagcggaccgcgatcttggcacgcgaacccgggtcgcgggacgcagccatgacttcgatcaggccttcggcgatttccggcacttcgatacggaacagctcgatcagcatttccggcgcggtacgcgacaggatcaactgtgggccgcggttctcggtgcggatttccttgagcagcgcacgcagacgcacgccaacacggaaggtttcgcgggaaatgatgtcttcgcgagccagcaacgcttcggcgttgttgcccaggtcgacgatcacgttatcgcgggtgacctttttcacggtgccggagatgatttcacccaggcgctcgcgataggcgtcaacgacttgagcgcgctcggcttcgcgaaccttctgcacgatgacctgtttggcggtctgtgcagcgatacggccgaattcgatcgattcgatcttttcttcgacgacatcaccgaccttggcaccaggatgcgtttcggcaaccttgcttggccaggtttcgatggccggatcatcaagatcggcttcttcgacgaccgtccagcgacggaaagtctcataggcaccggtgtggcggttgatttccacacgcagatcaacttcgtcttcaaaacgcttcttggtagcagtggccagggccagctccagcgcttcaaaaatcacgtttgccggtacgcccttttcattggataccgactcaacaaccagcagtacttctttgctcatcgtacgcctcgcctttcgcaagccattggatccgcgggatccgcgtctcagtcaaaactgggaataatgttggccttgtcgatcatatcgatcggcaacaggaactcatggtcttctacctgcaccacgacatcctgctcttctacaccgcgcagaaggccctgaaagttgcgtcgcccttcaaagggagagcgcagcttgatcttcacttgttcaccggcaaattttgcaaactgatcaatagtgaacagtgggcgttccatgcctggcgaggaaacttcgagggtgtattcaacggcgatcggatcttcaacatccagcacaccgctgatctgacggctgacaatggcacaatcgtccaccagcacgccgccctctttatcgatataaacgcgcaacattgagtggcgaccttgagccgaaaactcaataccccagcattcatagcctagggccacgaccaccggggccaacaaggcctgcaactcttctagcttgctcgacacctgaaccccctcgtgcatgtatgtgcatgctgtgcaaaataaaaaaatgggcgaaacgcccatccttgaaacgccgtcgaacagcggcgttgaaagtgtccagctaacaaaaagccccttaaaaggggctccgctaaaactggttgcgggggccggatttgaaccgacgaccttcgggttatgagcccgacgagctaccagactgctccaccccgcgacaaagctggggcggaagtatacgaccgatcccttaaagggtcaatgtaaccttccacctacaagaaagcccgcaacagcgggctctcctgataattggtaccgagaaggggactcgaacccctacaccctatgggcacaaccacctcaaggttgcgtgtctaccaattccaccacctcggcaatacagcgtttacaacccttcttacttctgctcttgagctggaggtacgtcagtcgctggaatagccgacttttgctcttgaagcaccgggacatcatcagaagccggttttgcttttggtacttccaacactgctggatttgggagacctacttgagtcagcacatgagctttctctttagcaaagtaacctaaccccaagctggttatgaagaaaccggcggcaagtatagcagtaaacttactaagaaaggtagaggaaccttggcttccgaacacagtatttgaagcacctgcaccgaaagacgcaccagcatccgcacctttaccctgttgcagcaaaaccagagcaactacgctcagagcagccaacagatgaaaaacgactacgactgtttccagcattttttcagtttcccgcggcgcgacaaatcgcaccgaactcatctgcattcagggaagctccaccaatgagccccccatcgatatccggcatgccgaacagttcgaccgcattggccgccttcacgctgccgccgtatagaagccgcacaccttgtgcgacttcagaattctctgccgccaactgcgcacggatggctgcgtgcacatcctgcgcctgttgcggtgtagcagtcagcccggtgccaatggcccagaccggctcgtaggcgattactgcctttgcaaacgcaccaacacccagctcctcgatgatgctgcccagctgacgcgagacaacttcaagagtcttgcccgattcgcgctgctccagggtctcccctatgcacaacaccggaatcaagccacaagcctgtgctgctgcgaacttgcgattgagcgtcccatcacgctcgcccatcatctgacggcgctcggagtgcccgacaagcacgtaggaacaacccgcatcgaccaactgactcggcgctatctcaccggtcaatgcaccttgcatggcttccaccgcagaattctgcgcgccgacctggatcgacttgcccttcaagccatcaaccacttgggtgatatgcaagcaaggcgggaaaaccgcgacatcaacaccgctcggcaaggccaagtgacgaaggccattgatcagctcagcgacactggcgcgggtaccgtgcatcttccagttaccagctaccatagtgcgacgcatgctgtacctcgtcggtcaaagtgggcgcagatgttacccaaccacatcatcactggcaagccgaattcaggcgcaaacttcagttaccagttttgccaggtcttcggcatggccgcgaacctgtgtttcatcgtcaccttcgaccatgacacgcaccaatggctctgtgccggacttgcgcaacagcacacggccacgccccgccattgccagggttacacgctcgcatgcctctttgacagccggatgctcaataggattttcaccgccagcaaaacgcacattcagcaatacttgcggacacttgcgcatagcttggcgcgcctgggccaggctctcttcacgacgcttcatggccataagcacctggagcgcagcaatgatcgcatcacctgtcgtggtgtgctggaagcagacaacgtgcccggaattctcgccacccacctgccagttgcgctcaagcagctcggcgatcacatagcggtcgccgacattggcacgcacgaacggaatacccagatccgccaaggccagttcaagccccaggttactcatcagcgtaccgacgacaccaccttgcagcttgttacgctcatgcatgtcgcgggcaatgatgaacaggaggtcatcaccatcaacaatggcgcctgtgtggtccaccatcagcacgcgatcaccgtcaccgtcgaaggcaatacccaggtcggcatgctcggcaaggacggccgcctgtaactgctccatgtgggtggagccacagttctcgttgatgttcaatccgttaggctgagccgacagcaccgtcacgtctgcgcccaactccttgaatacgctcggcgccaccttgtaggtcgcaccatgggcgcaatcgaccacaatcttcaggccggcaaaattggtgctgcttggcacgctgcttttgcagaactcaatgtatcggccggaggcgtcgttgatacgcgacactttgccaagcttgctggactcgaccaccgtcatcggcgcatccagaagctcttcgatcatcagctcgatctcgtccgggagcttggtgccctggcccgagaagaatttgatgccgttgtcatcatgagggttatgcgaggcactgattacgataccggcttcagcatgaaaggtacgcgtgaggtaagcgatcgccggcgtcggcatcggccccagcagcatcacatcggcacctgcggcagacagccccgcctccaacgccgactcgaacatataccccgaaatacgagtgtccttgcccactaggatgcggcacgcgcccatgctgcggaacgccatacctgcagcccaaccgagcttgagcatgaaatcaggagtaattgggaactcgccgacccgaccgcgaataccgtcggtaccaaaatattttttagtcataagtgctccatcattcttattcggctgattctaccgcggccatcatacgcaccacatccatcgtctcgacaacatcatgcacccgcaagatacgcgcccccttggtgactgcaagcgccgccagcgcaagaccgccgtacagccgctcgcccacaggacgattcagcgccagcccgatcatgctcttgcgtgaaacgccgaccagaagaggccgaccaagggcatgcaaggactccatatgtttgaacagacttagattgtgctgcagggtcttggcgaagccaaaaccgggatcgaggacgatcttttctgcagcaatcccggcagcagtgcattgcgcaacccgctcggcaagaaacccactcacctcaccaacaagatcatcgtagtgagggttgtcttgcatattgccgggctcacccagcatatgcatcaggcaaaccggcaaaccggtggccgcagccgcatcaagcgcaccgtcacgctgaagcgagcgcacatcgttgatcagccccgccccaaggcgcgccgtctcacgcatcacggccggcgtcgacgtatcaaccgagatgatcacatccagctcacgtgcaatgcgctcaacaattggcgcaaccctctccaactcttccaggggagaaacgatgcgagcgccaggccgcgtcgactccccccccacgtcaatcaacgtcgcgccagccgccaccatcgcctcggcatgacgtaacgccgcatcgagttgactgaagcgaccaccatcggaaaaggagtcgggggttacattgagaatgcccatgacgtgcgtatgggccaaatcaagaacccggttgccgcaaggcaaccgggtggaggacaacacagaagtcatttcaaaccttagacgtcagctgcgggaccgccaatcggggtttcagggcgttcgttctgaaccactggcggagtgccagaagtgcccgaaccaccttcccaatcgcgaggctcgcgcggcgtgcgaccggccatgatgtcgtcgatctggtcggcatcaatggtctcgtacttcatcagcgcatctgccatggcatccagcttgtcgcggttgtccgtgaggatctgcttggccgtgccgtagcactggtcaatgatgctgcgcacctcggagtcgatcagcttggctgtctcaccggagaagctggcgttttgaccaccaccgccacgccccaggaacacttcgccttcttcctcggcatacatcaatggaccgagtttttccgacaagccccacttggtcaccatgttccgcgcaatctggctggcacgcatgatgtcgttggaagcaccagtggtgacgccgtcgaagcccagggtcatctcttcagcaatccggccgccgtacagcgagcatatctggctgatcagtgcacgcttggagaggctgtaacgatcctcttccggcaggaacatcgtgacacccagcgcccgaccacgcgggatgatcgacaccttgtagaccgggtcgtgctcaggcacgacacgaccaacgatggcgtgaccagcttcgtgataagcggtgttctgcttctctttctcggacatgaccatggatttgcgctcggcgcccatcatgatcttgtctttggccaattcgaactctttcatctccacgatacgcttgccagtacgggcagcgaacaacgaggcctcgttgaccaggttagccaggtcggcaccggagaagcctggagtaccacgggcaatcacggccggagccacgtcgtcgcccatcggcactttgcgcatgtgcactttcaggatctgttcgcggccacggatatccggcaagcccaccacaacctgacggtcgaaacggcctggacgcagcagcgcagggtccagcacgtcaggacggttggtggcagcgatcacgatgatgccgtcgttcatttcaaagccatccatctcaaccagcaactggttaagggtctgctcacgctcgtcatgaccgccgcccataccggcgccacggtggcgaccgacggcgtcgatttcatcgatgaagatgatgcaaggcgcatgctttttagcctgttcgaacatatcgcgaacacgactggcaccaacaccgacgaacatctcgacaaagtcagaaccggaaatggtgaagaaaggcaccttggcttcaccggcaattgccttggccagcaaggttttaccggtacccggagggccaaccatcagcacaccgcgaggaatacggccacccaggcgctggaacttgcccggatcgcgcaggaactcgaccagctcgcccacttcttccttggcttcgtcgcaacccgcaacgtcagccagggtggttttcacctggtcttcagagagcaggcgagccttgctcttgccgaagctcatcgggccgcccttgcctcccgcaccgccttgcatctggcgcatgaagaacatgaacacggcgatgatcaccaggatcgggaagctggctaccagcaattgggtccagatgctctgctgctcaggctgcttgccttcgaccaccacgtgattatccaccaggtcgccgatcagaccgttgtcctggattgccggacgaatggtcttgaagctgtcgccatcgttgcgtttgccggtgatcacgtagccatcaaccgctacgcgctcgaccttgccatccttaacttgctggatgaagtcggaatagttgagggtctgcggctcgttagggctggagaagttgttcatcaccgtcaccaggacagccgcgatgatcaaccacaggatcagattctttgccatatcgttcaattaactaccctctgaagcaagctccgctactggcgcgcgcttcgcatgatattcaccggcctaacttactacattacctacaacactggcaggcgccgtctgtaaccctttgtgaaactttgactacacaatattcgtaaagcttcgtgacgaaagcgatataaaaaaacctatcgactcccttcaaaccttcaaagacgctcatcactggcggcgccttcgatgccacggaacccccgcgccaacagatactgctcgcgagaccggtcacgcgaggagtccggtttgcgcatctgtaccttgtcgaacagcttgcgaatgttcttgtggtactcgtcgaaaccttccccctggaagaccttgaccaggaaatcaccacccggacgcaatacccgacccgccagatccagtgccaattcgcacaggaacatggctcgcggcatatcaacagccggtaacccactcatattgggtgccatgtcggaaatcacaaggtccacctgcgaatttcctacagcttccaggatctcggccaggaccgcatcctgggtgaagtcaccatgcacgaaggtcacatccgggatgctgtccatctccaggatgtcagaagcgatcaatcggccttgcccaccaatcagacgactggccacctgggaccagccacccggggcagcgcccaggtcgatcacactcatgccggggcgaaacaatttgtccttgtcctggagctccagcagtttgtagctggcccgggaacggtagccgtccttttgcgcctttttgacgtaaggatcgttgaaatgttcttgtagccacttaaggctggttttggaacgggccacgggccacctcgaaaaataaaacgggtcgtgattaactgggcggtcccggactcgctcgggtaaactggccgccgctttttacaagatcagacgcaggggtcagattatgccgctcactcaagagcagaagaaacagtacaaatccattggccaccatctgaaaccagttctgattgtggcagataacggtttgactgaaggtgtgttagccgaattcgaacgtgcgctgaacgatcatgaactgatcaagatcaaggtcaacatccttgatcgcgaagcgcgcctggctgccattgcagaactgtgcaaggcaggcaaagcggacctggtccaggtcatcggcaagatggcgctgctgtatcgcaagaacttcagcgtcaacaaacaactgtcgaacgtacaccgcttcaaatagctttaaaattacaaaagggtcacgggcgtgcttcgcgcgccccgccactccatcccggcgcaggctgcaaaaccagcaccaggccggagaaccctagcacaagatagctgaatagctgccagcgcaacgcttccggcaaccagacatgcaccacgcaaaacattgcgcatgcatacagcgccatcaacagcagttgcccgcgaatatcccgccacaaactctccaaaccctcggccttgaccagcaccaatgcctggagcgtcacgcacgccgccgcaaatcccaccaacagcgcactgagcaatccatcgatctcattgatcagcagcggtgccaggcctatcaggccgagcgccggcagcacaccaatgtgcaacaaccaaaggccgcccacccaaagcatctgggagagctgccaaagcatggcgcccgcacgaagcgggcgccgtctttcagacgtgacgaacttcaacaatctcgtactcgattacgccacctggcgtctttacagccaccacatcaccctcttccttggcaatcaaggcacgggccagcggggaaccgacggagattttgccgagtttgaaatcagcttcatcctcaccaacgatgtggtagaccacgctttcgtcagtttcaacgttggcgatttccacggtggtgccgaagatcaccttgcccgtcttcggaatggtcgtcacgtcgatgaccaccgagttttgcaagcggccttcgatgtcacggatccgcgcctcgaccataccttgctgctcgcgggcagcgtggtattcggcgttttccttcaggtcacccagttcgcgggccgtaccgatgtcctggctcagcttcggacggacgaccttggtcagatgggcgtgctcctcttccagggccttgaagccctggacggtcattgggtatttggtcatgccttcaatcctgcgtgtagatcctgcaagcggcgcacggtcttttcaggaccgaacttgagcgcttcgcagatggcttcgccagcagcaatggtggtggtgcagtagatcttgtgctgcaaggcgttacgacgaatggagtaggagtccgcgatcgactggcgaccttcggtggtgttgatgatcagggtgacttcgtcgttcttgatcatgtcgaccacatgcggacggccttccgtcaccttgttcacgcgacgcactttcaggccggcagcttcgatcagcttggcggtcccggcggtggccacgacttcaaagcccaagttgatcagatcacgggctacgcctgcaaccagtggcttgtcgtcatcacgcacgctgatgaacgcagtaccgccggtcggcagcacttcgctggcgcccatctgggccttggcaaaggcttcaccgaaggtatcgcccacacccatgacttcaccggtggacttcatctctgggcccaggatcgggtccacgccagggaatttggcgaatgggaacaccgcctctttcacgctgtagaagttcggaatgatttccttggtgaagccgatttccttcagggtcttaccggccatcacgcgcgcagcgatcatggccagggagacgccgatgcacttggaaacaaatggcacggtacgcgaagcacgtgggttgacttcgatgacgtagatgtcttcgccttgcagcgccaactgtacgttcatcaggccaactacgcccagttccagggccattttcttgacctgttcgcgcatctcgtcttggatgtgcgctggcagcgagtacggtggcagcgagcaagccgagtcaccggagtgaacgcccgcctgttcgatgtgctgcatgatcgcgccaatcaccacgtcggtaccgtcgcacaccgcgtccacgtccatctcgatggcgcagttgaggaagtggtccagcagcaccgggctgtcattggacactttcaccgcatcgcgcaggtaacgcttgagttcttcttcttcgtagacgatttccatcgcacgaccgcccagcacgtaggacggacgcaccaccagcgggtagccgatcttgctggctgcgcggatggcttcgtcttcactgcgcacagtggcgtttggcggctgacgcaggttcaggcgctcaaccatttgctggaagcgctcgcggtcttctgcacggtcgatggcgtccgggctggtaccgatgatcggcacgccggcagcttccagggcacgcgccagcttcaggggggtttggccgccgtactggacgatcacgcctttgggcttctcgacgcgcacgatttccagcacgtcttccaaagtcactggttcgaagtacaggcgatcggaggtgtcgtagtcagtggaaacggtttccgggttgcagttgaccatgatggtctcgtagccatcttcgcgcagggcgagggcggcgtgaacgcagcagtagtcgaattcgataccctggccgatacggttcggaccgccacccaggatcatgatcttgtcgcgacccgacggcgcggcttcgcactcttcctcataggtggagtacaggtaggcggtgtcggtggagaactcggccgcgcaggtgtcaacgcgcttgtagaccgggaagatctccagcttgtggcgatgggtacgcaggttcttctcggtcacacccagcagcttggccagacgttgatcagagaaacctttgcgcttgaggcggaacatcatgtcgcggtcgatgctggccagacccagggtcttgaccttctcttcttccttgatcagatcttcgatctgcaccaggaaccacggatcgatcatgttcatgccgaagatatcttcgacggtcatgccggcgcggaaggcgtccgccacgtaccagatacgctcggcgcccggcacggtcagctcacgcttgagcacgctcatgctttccgggttgctcaggtcgagcttctcgtccaggccgcaaacgcccacttccaggccgcgcagggctttctgcagggattcctggaaggtacggccgatggccatgacctcaccgacagacttcatctgggtggtcaggcgcgcgtcagccttggcgaatttttcgaaggcaaaacgtggcagcttggtcacgacgtagtcgatggacggttcgaaggacgccggagtcttgccgccggtgatgtcgttcgacagctcgtccagggtgtaacccacggccagcttggccgcgaccttggcgatcgggaagccggtggctttcgacgccagggccgacgaacgggaaacacgcgggttcatctcgatcacgaccatgcggccggtgttcgggcagatgccgaactgaacgttggaaccaccggtttccacgccgatctcgcgcagtaccgccagggaggcgttacgcaggatctggtattccttgtcagtcagggtctgtgccggagcgacggtgatcgagtcaccggtgtgcacgcccatcgggtcaaagttttcgatggagcaaacgatgatgcagttgtccttcttatcgcggacaacctccatctcgtattctttccagccgatcagggattcgtcgatcagcagctctttggtcggcgacaagtccaggccacgggcgcagatttcttcgaactcttcgcggttgtaagcaataccgccaccggtgccgcccatggtgaaggacggacggatgatgcacgggaagcccagggtctcgaggaccgcattggcttcttccatgctgtgggcgataccggaacgcgggcaggccaggccgatggacttcatggccttgtcgaagcgcgaacggtcttcagccttgtcgatggtatcggcattggcaccgatcatctctacgccgaacttttccaggacgccttcgcgctccaggtccagggcgcagttcagtgcggtctggccacccatggtcggtagcagcgcgtccggacgctccttctcgatgatcttggcaacggtctgccacttgatcggctcgatgtaggtggcgtcggccatggccgggtcggtcatgatggtggccgggttggagttcaccaggatgacgcggtagccctcctcgcgcagggctttacaggcctgggcgccggagtagtcgaattcgcaggcctggccgatcacgatcgggccagcgccgagaatcaggatgctttttatgtctgtacgttttggcatgggtttgtcactcaaatccgcaggtcagtcggcaagccgtcttgaacaatctttgaagagcctgcgggggccaccgacattcggggccgcccgcaggccgctcagtcagcgtcgcttggccatctcattgatgaaacggtcgaacagcggcgctacgtcgttcgggcccgggctggcttcagggtggccctggaagctgaacgcgctcttgtcggtgcgctcgatgccctgcagggaaccgtcgaacagcgacttgtgaatggcgcgcacgttgctcggcagggtggcttcatctaccgcaaaaccgtggttctggctggtgatcatcacaacgccggtgtccaggtcttgtaccggatggttggcgccgtggtggccgtgccccattttcagggtcttggcgccggaggccagggccagcagctggtgaccgaggcagataccgaacaccggaatctcggtttccagcacttccttgatcgcctggatggcgtagtcgcatggctcagggtcacccgggccgttggacaggaacacgccgtccggttgcagggcgagcacgtcgctggccggggtttgcgccggcaccacggtcacgcggcaaccgcgctcgaccagcatgcgcaggatgttgtacttcacgccgtagtcataggccactacgtggtaaggcagatctgcggcttcgatagtcgcatggctgtcggtcttcaagtcccagaccgtggagcgccattcgtacttctctttgacgctgacgactttcgccaggtccatgcccttcaggccagggaagccctgggctgcggcaatcgccgcctcctcggaaatattgtcaccgaccatgatgcagccgttctgcgagcctttctcacgcaggatgcgcgtgaggcggcgtgtatcgataccggcgatcgccaccacgttgttggctttcaggtaatcggacagcgacatcgtgttacgccagttgctcgcaaccagtggcaggtcacgaatcaccagacccgccgaccagacacgatcagactcgacgtcttccggtgtagtaccggtattgccgatgtgcggataggtcagggtaacgatctgttgggcgtaggaaggatcggtaaggatttcctgatagccggtcatggcagtgttaaacactacctctccaacggtctgaccgtcggctccaatggcttcgccgcgaaaaatgctgccatcagcaagggcgagtatggctggcttagtcaagaagacctcccgtaaataaagcctgaaagggcgatcgcaggttgtaaaaaagcggagtgacgtatggacacgtcaccccgcttcttcaccgaattattctgcgcgcttttagtggacacactaaagctgtagcttacagaaaaaggcttttttggtccaccgctaatgagccttaaaggcaggggaatgcgacaggacgtcgcttagcgggtaaaaacggggcctaagcataagcttgaggccccgttttagctactgattagtgcagatccagcacatcgcgcatgtcgtaaaggcccgcctcgcgcccctccaaccagagcgcagcacgcaccgcgcccttggcaaacgtcatgcgactggacgccttgtgcgtgatttccaggcgctcgccctcagcggcgaacaacacggtgtggtcacccaccacatcacccccacgcacagttgcaaagccgatggtgtcgcgcgcgcgcgcaccggtgtggccttcacggccatacaccgccactttcgacaagtcgcgacccaacgcatcggcaatcgcttcgcccatgcgcagagcagtacctgacggcgcatcgatcttgtggcggtgatgggtctcgatgatttcgatatccgcttcatccccgagcacacgggcggccaaatcaagcagcttgagcgacaggtttacacccacactgaagttggccgcgaagacgataggaatatccttgcccgcctccaccaacagctgcttctgctcaagcgtcaaaccggtggtgccgatcaccatcgccttgcccgccttgcggcagaacgccaggtttttcagcatcacgtccggcagggtaaagtcgatcagcacgtcgaactcgtcagctacctgctccaggttacccgacaacgaaacgccgatgcgccccagtgaagccaactcaccggcatctgcaccgatcaacgtgctgcccggacgaacgatcgccgcggtcagcccggaggccggcgagcgttgctgtaccgcctcgaccagtgtcttgcccatgcgcccggcagcgcccattacggctatacgtcgcatactcaattccttacaggtcgccgaagaagcgcttcacgccttcgaaaaagccagaactttgcggcgattgagagctgttaccgtccaacgaactgcggaactcttcaagcagctcacgctgacgacgatccagattgaccggagtctctaccgccacacggcacatcaggtcaccagcaccgccgccacgcaccggcgcaacgcccttgccgcggatacggaactgcttgccggtctgcgtgccctcagggatcttgagcttgacccgaccgtcgagagttggaatctcaagctcgccacccagcgccgcatcaacgaagctgatcggcacttcgcagaacaagtgcttaccgtcacgctggaagatcgagtgctcgcgcacattgatcaccacgtacaagtcgcccgtagggccaccctgagtacccgcctcgccttcgcccgacagacgaatacggtcaccggtatccacacccgccggcactttcaccgaaagggttttgtactcttcgacacgaccttcgccatggcacgagtcgcacgggtcggaaatgatcttgccctgaccatgacaacgtggacaggtctgctgcaccgagaagaagccctgctgcatacggacctggccaataccgccgcacgtcgggcaggtgatcggcgaagaacctttcttggcccccgaaccgtcgcacggcttgcagttgaccagcgtcggcacacggatattcacgctggtgccgcgcacggcttcttccaggttcaactccagggtgtagcgcaagtcgctgccacgctgggcgccgccacgctgaccaccccggccaccgccgaagaagtcactgaatacgtcaccgaagatatcggagaagttctgaccaccaaaaccggcaccgccgccacccatgctcgggtcgacgccggcatggccatactggtcgtacgccgcacgcttgttgggatcagacagacattcgtaggcctcattggcctctttgaacatttcttcggattctttgctatccggattacggtccgggtgatgcttcatcgccaggcgacggtaggccttcttcaggtccgcctcgctggagccgcgctccacacccaatacttcgtaatagtcacgctttgccataagtctttgcactcttaaggacgttcagccagaccctcctgagccttgccaaactcgttgagccccaatacaggcccggacccaactcacgtcaattcaacgatcctggtcattactacttttagccaggtacccggccaaaaatgcggtatttactgctcggaaagcaggagcattcccgatcacaccgccagcatccgaacactgtcgcatgctgtaaaaattcgcataccccagacacgccaacgcgggagcaagctcccgcgcggcgacatcctaccagtcaccgcttgatagcggtcaaccgggcgaccaacttacttctggtctttgacttcttcgaactcggcgtcgacaacgtcgtcgtgcttggcttcaggctctgcgtgctgcgcagcaccgtcagccggctggccttgttcggcgtacattttctgagccactggcgcagagactttcgacagctcttcgatcttggcttcgatagccgccttgtcgtcgccttttacagcggcttccagggcaactacagcagcttcgatggcagccttctcttcagcagtcactttatcgccagcatcagcgaccattttgcgtgtcgagtgaaccagtgcgtcaccctggttacgggcgccagccagctcggcaaacttggcatccgcatcagcgttggcctcagcatcacggatcatctgttgaatttcttcatcagacagaccggagttggccttgatggtgatcttctgctctttgccggtggccttgtctttcgcgcctacgtgcaggatgccgttggcatcgatgtcgaaggtcacttcgatttgtggcacgccacgtggtgctggtggaatctcggccaggtcgaacttgcccagggacttgttctgagccgcttgcttacgctcaccttgcagcacgtgaatggtcaccgcgccttggttgtcgtcggcagtcgagaacacctgggatttcttggtaggaatcgtggtgtttttctcgatcagcgccgtcatcacgccgcccatggtttcgatacccagagtcagcgggctgacgtccagcagcagcacgtctttgacgtcgccggccaataccgcaccctggatggcagcacccatggcaactgcttcgtccgggttcacgtctttacgcgcttctttaccgaagaactcggtaactttctgttgaaccagtggcatacgggtctgaccgcctaccagaatcacgtcgttgatggagccaacgtcgataccagcgtctttcaaagcgatgcggcaaggttcgatggtgcgctgaaccaggtcttcaaccagtgcttccaacttggcgcgagagatcttcacgttcaagtgcttaggaccggtggcgtctgcagtgatgtacggcaggttaacgtcggtcgacatgctcgaggacagttcgatcttggccttctcggcagcttctttcagacgctgcatggccagcgggtcacccttgaggttcatgccgctttctttcttgaattcgtcaacgaggtagtcgatcagacggatgtcaaagtcttcaccacccaggaaggtgtcgccgttggtagccaacacttcaaactggtgctcgccgtcaacttcagcgatctcgatgaccgacacgtcgaaggtaccgccacccaggtcataaacgatcacggtgtggtcgcctttggccttgtccataccgtaagccagagcggctgcggttggctcgttgatgatacgttttacgtccaggcccgcaatacggccggcgtctttggtcgcctggcgctggctgtcgttgaagtaggccggaacggtgatcaccgcttcggtcactgtttcgccgagatagtcttcggcagtcttcttcatctttttcaagacttcagccgagatctgcggcgcagacatcttgttgccatttacttcaacccaggcgtcaccgttgtcagccttggcgattttgtaaggcaccatcttgatgtctttctgtacgacttcttcgtcgaacttacgaccgatcagacgctttaccgcgtaaagggtgttgtgcgggttggtgacagcctgacgcttggccgactgaccaaccaagatctcgccatcatttgcgtaagcgatgatcgacggcgtggtacgtgcgccttcggcgttttcgataactttggctttgccgttttccatgacggagacgcaggagttggtggtccccaggtcgataccgataattttgcccatgatttactctcccgaaacttgaatttggttgccgcagcagtggtggctaactgcggtagcacttaaacgcttgacttatagatgggggctttacagcgtatttcaagcctgctcatcaatagaaggcgaaaccggtgcaggcgccttgctcaccacgaccatcgccgggcgcagcaggcgaccgttgagctgataccccttctggaacactttcagcacgctgttaggctccaggtcatggctttcctgcatggccatggcttggtgatgctcagcgttgaacggttcgccgccggttggatcgatggcttccagctgataacgcttcagggtgtcctggaacattttcagggtcagctcgatcccttcgcgcatcgggcggatgttttcatcgtccgggttggacaactcgagaccacgctccaggctgtcgatgatcggcagcaagtcactggcgaatttttccagcgcgaacttgtgagccttttctacatcctgctcggcacggcggcggacgttctgcagatcggcggcaacacgcaaagattgatcctgcgcagcagccaattgctcttcgagcacttgcacacgcgttgccagctcatcgccgacagccgaattggcgtctggagtttgcgtatcctgcgtctgttcgtcagccatagttttctcctttcaaaatcatgcacgaactcaactcgcgcttctgttccggtatatggggccacaatttccaggttcaagagcgcaggcgttaccaaaagtctttcccatgatcgggatcaattcctgccgccccattccgcattgcgctaaaaaacacgctcattcaagcaaatcgagctaagcgccaggattgtcagccctgaacaaaacactgtataaataaccagacctaaagcctgggagcgcccgtcatgctcgtgcacctgtccgtacataattacgccatcgttgaacatctggatctcgaactggatcgcgggatgagcgtaatcacaggcgaaaccggcgccggcaagtcgatcatgctcgatgccctgggcctcaccctgggtgatcgcgccgacagcggcgtggtgcgccccggcgcagacaaggccgatatcctggccaccttcgacctggccgatattcccgaggccgaaacctggttgaccgaacgcgaccttaataatgaaggcccgtgcattctgcgccgggttatcacggcggaaggtcgctctcgcggctatatcaacggcacgccctgcccactgggcgacttgaaagccctgggcgagttgcttatcgatatccacagccagcatgagcaccagtcgctgctgaaaaccgacacccatcgccgcctgctcgatgaatatgccggcgccacagaccttgcccgccaggtgcaacttgccgcccagcgctggcgccagacgcggcaggaactggagcgactctccaactccggcgatgaacaacgcgctcgtcatcagttgctcagttatcaactcgaagaactggaaagcctgggcctaggcgagactgaactggagcagcttgagcaggaacacaagaacctcaccaacgctgaaaccttgctgggcatttgtcgccaggtggtagagcaatgcagtgaaagcgactcaggcaacgtgctcaatgcactgactgccagcctcaatcgcttgtcgagcgtgaacaatgcctccggctcgctgagcgaagctacgacactgctcaccagtgcacagattcaggtggaggaagcggtcggtgaattgaatcgctttctggaccacttcgatgccgatcctgcacgcctgcaggaaatagaagagcgcctggacaccatctataccctggcgcgcaagcatcgaatccagcctaccgaagtggcaacgatgcagcaaaagctgctggatgaaatcgagaccctgaatgcgaatgacgaatccatcgaacgactgggcgaagaactcgcctcgttcgctcgtcattaccaggagaaagcgcgcgaactgagcgacctgcgccaacaagccgcgaccggcctggccagcgcagtggaacttgagatccaacgcctgggcatgccgggcgggcgcttcaccattgaactgcgcgccaacgccagcaacgagctgcaaccccacggcctggaacaggtggaactgctggtcagcgccaaccctgggcagccactcaaggcgttggcaaaagtggcatccggcggcgagctttcgcggatcagcctggcgatccaggtgattaccgcgcaaacctcccgggtgccgacgctggtgttcgacgaagttgacgtgggcattggcgggccgacagcagaaattgttggccaactgttgcgacgcctgggggatagaggtcaggtactgacggtcactcacttgccgcaagtggcagcccaagggcatcaacacttgtttgtgcacaaggtacgcggcagtgatgcaacgcacacagccgtatccaagttgaacaagtcggaacgcgtggaagaagtggcgcgcatgctcggcggtattgatttgaccaaggagtcgttggcgcacgcgaagaaaatggtcgtggcggcaaaggcctgagcgaaaaatttccttcttatagaaagcacgaaggcgaccctgaggtcgccttcgatcgttttgcagcgtaaatctgcagcgcttgttactttttcttacggatgtaaaggaccagattatggtcaaccagatcgaagccatgctcttcagcaatcttatgctgcagcgcttcaatctcggggctggtgaactcgataacctcattggtatccaggtcaaccatgtggtcgtgatgaccaccgtcagccaattcgaacactgcatgaccgccgtcgaaattatgacgaaccaccagccctgcggcttcaaactgggtcagcacacggtaaaccgtggccaggccaacgtcctcgttagactccatcagtgccttgtagacatcctcggcactcatgtggcgctgctcagcagaatcgagcatttgtagaatcttgactcgtggcagagtcactttgagaccggctttgcgtagttcgctattttcaaccatggttagctttctcgcggatgctgcttcgcagcttctcttaatacgggtatgatcggcgtttacgttgtcccagccaagatagtggaagtcgcccaccgatgcaaaacaccaagctcttgctaaccagtttcacctttgtgggactgctcgcactcgccggttgttcattccccggggtttacaaaatcgacatccagcagggcaatgtcgtcacgcaggacatgatagaccagttacggcccggaatgacccgacggcaagtacggtttatcatgggcaaccccctgctgaccgacactttccatgccgatcgctgggattatctctacagcctgcagccaggtggcggtgaacgccagcaggagcgcgtcagtgtcatcttcaatggcaatgaccagcttgtcagcctgtccggcgacttcatgcccggcgtaagccgtgatgaagccctgcttggcaaggataacggcaacaacgtgacttcgcctgcgcaggaagctgagaagcccaagtccgaagtaccagccaagcccggctccttgctcgacaagatccagaaagacgtcgacggcgtggaaacagtgcccgtcccgacgcctcagcctctggacaccagcccgcagtaagtttgcggcgctcaacaaaaagcccggcatgccgggctttttgctgtctgccatttgactggcctatgaactctgctgcttagccaaggccgccttggccgcgcgaagccggcgcacttctttcgggtccgccagcaacggccggtaaatctcaatacggtcaccgtcctgcactgggcgcacatcagcatccgtaaccaccctgccgaatatccccaaaggacaatccgccaaatccagctcgggaaattgcactgcaatacccgacgcctgcaccgcagcacgcagctgggtgcccgccggcaccgtcaccgccagcaacacctggcgatcctcggctgcatacaccacttcgatctcaaccatgcagttgcttggcccgctgacaaaatgcatccaccagggtattggccgcctggttgaacaacgggcccagcgtcgcccgcacaataggcccggcgtaatcaaaagaaagatccaggctgattttgcaggccttatccgtcagcgccttgaacacccatacgccatgcagctgggtaaacggcccttcctgcaaattcatttcgatggacttaccgggcaccagcacattacgcgtaacaaaatgctgactaaggccgcccttcgcgacccccacactggcgaccatgtgctcatcactgctttccagcacctcggccgttgagcaccacggcaggaattccgggtaacgcgccacgtcgttgaccaggtcatagagcgcctgtgccggatagggcaacagcgccgaacgttgaatatgcgtcgtcatgtgtgcgttatttccacagctgaggcaaacatcgcgaaaaaacagcccgatccgcgaaagaaaaaatccagagaactgcccgcattgtccgggattcgtccaacacgctcaagcacgcaggttgaccgtagccgacacgctcgcaactccctataatgccgcccctatggctaaacaaaagaaacaccccacagggaccatcgcgcaaaacaaaaaggcgcgacacgattacttcatcgaacatcggttcgaggctggtctggtcctggccggctgggaagtaaagagtctgcgtgccagcaagctgcaactggtcgacagttatgtgctgctcaaggatggcgaggcgtggctgctcggcagtcatatcaccccgctgaccaccgcgagcacccacgtgatcgccgacccggtgcgtacgcgcaagttgctgctcaatgcccgcgaactggaaaagctcgcagccgctgtacagcagaagggttatgcctgcgtctgtctgtcctggtattggagcaagcacctggtcaagtgcgaaatcgcactgggcaagggcaagaaggaatacgacaagcgtgattccgagcgcgaacgtgattccaaccgcgaactgcatcgcgccgtgcgcaacaagggcaaggaagaataatccttgctgcgatgcagccgtgggcgcccaccctcggctacatccccttgcgccgctccgcacgcgccacgcgctgaacttcctgacgcacttcctccagcacttcctgcacatacagcaggtgacgtgttgaaacctcgcgcgcctgctcggcgcgaccttcgataatcgccaggtacaaatcccgatgctgactgatcagcatgtcgcgggtttccgtacgctgttggtacatgccaccaatgttggtcaccacgttacgtttgagcaggtcgaacagaccgcgaatggtgtgcagcaacacggcattatggctggcttcggcgatcgccaagtgaaaccgcgcatcggccgcgccctcctcggcccgactcacctcatcggaccgggtatagcaatcctgtagtgcttcgaaggccgccgtaagtcgctcgcgatcaacctccgtggcgcgcagcgcggcgtaataggcgcaagaggcttcaagggtctggcgaaactccagcagatcacgctgggcctcgggattgttctccagcagatgcagcagcggatcactgaacgtggagcccagggactcagccacataattgcccccgccttggcgactgaccagcaaacctttggccgccaacttctggatcgcctcgcgcaaggaaggccgcgacaccccgaactgctcagccaaagcgcgctcggccggcaaacgctcgcccgacttcagcgtgccctcaaggatcatgccctcaagctgctcgacaatatcgtcagacaaacggcgctgacgcacctgatcaaaccccatcactcactctccaccatcccgaccactcgccagggcctctattctggcctatcgcggcgcttgcggcacctatcagaacgccttcctttcaaccgatcagaacaccctgcacagcgacctacgaccaaagtttcgcaggcggcaaattgacacgcccccagcaaggcttttactctagccaacagcgattgtaaattggtattaccaattacccaagctaaccaaacaacaacaatcaggggccaccccatatgcaaacctggcaacagctctacagcccgctcggcagcctcggcctgtccgcattggcggccgtcattccgatcgtattcttcttcctcgcccttgccgtgtttcgcctcaaaggccacgtagccggcagcatcaccctggcgctgtcgatcctggtggcgatcttcgccttccagatgccggtggacatggcgctggccgctgccggttacggctttgcttacggcctatggcctatcgcgtggatcatcgtcgccgcggtgttcctctacaaactcacggtcaaaagcggccagttcgagatcatccgcagttcggtcctgtcgattaccgacgaccaacgcctgcaagtgctgctgatcggcttctgcttcggtgccttcctggaaggtgcggccggtttcggcgcccccgtggcgatcaccgccgcgttgttggtcggcctgggcttcaacccgctgtacgccgccggcctgtgcctgatcgcaaacaccgctcccgtggcctttggcgccttgggcatcccgatcatcgtggccgggcaagtcactggcatcgacgcgttcaagatcggcgccatgaccggccgccaattgccgctgctgtcgctgttcgtgccgttctggctggtgttcatgatggacggcctgcgcggcgtacgtgaaacctggccggccgcgctggtcgcaggcttgagctttgccatcacccagtacttcacctccaacttcatcggcccggaactgccggacatcacctcggccctggccagcctgatttccctgaccctgtttctgaaagtctggcagcccaagcgcactgcgggcgcacagattgccggcgccacttccagcgctgcggtcactgcgagcgcaggcggtttcggcctgccgcgcaacacgattgtctcgccctacagcctggtgcagattttcaaggcctggtcgccgttcctgattctcaccgtactggtcaccatttggaccctcaagccgttcaaagcaatgttcgccgccggtggctcgatgtacagctgggtgttcaacttcgcgatcccgcacctggatcaaatggtgatcaaggtcgccccgatcgtgaccaaccccaccgctatcccggccgtgttcaagcttgacccgatttccgcgaccggtaccgcgattttcttctccgcgctgatctcgatgctggtacttaaaatcgacatcaagactggtcttaccactttaaaagagaccttctacgaactgcgctggccgatcctttccatcggcatggtgctggccttcgccttcgtcaccaactactccggcatgtcttcgaccatggcgctggtactggccggcaccggtgcggccttcccgttcttctcacctttcctcggctggctgggggttttcctgacaggttccgacacatcgtccaacgccctgttcagctcgctgcaagccaccactgcgcatcagatcggggtgaacgacaccctgctggttgccgcgaataccagcggcggcgtcaccggcaaaatgatctcgcctcaatctatcgccgtggcctgcgccgcaaccggcctggtaggcaaggaatccgacctgttccgcttcaccctcaagcacagcctgttcttcgccaccatcgtcgggctgatcaccctggcccaggcctactggttcaccggtatgctggtgcactgagacctgcacgctatagggtaagaatcgacgccggacaacggttccggcgtcagctatttctggaggaccgatgagcctgcctgctgctttcctgcgcgacgtcgcacaactgatcccgaaagatcggcgcttcgacgacccgctttccaccctcgccttcggcaccgacgccagtttttaccgactgatcccacagctggtaatccgtgtggagtcggaagacgaagtcgtcgcgctgctgcaactggctcagcgcgaccatgttccagtgaccttccgcgccgccggcaccagcctgtccgggcaagccatcagcaactcggtgctgatcgtgctgggggacaattggaacggccgcgagatccgtgggcagggggcacaaatccgcctgcagcccggcgtgatcggcgcccaggccaacgcgtggctggcgccgttcgggcgcaagatcgggccagacccggcatcgatcaacgcctgcaagatcggcggtatcgtcgccaacaacgccagcggcatgtgctgcggcacggcgcagaacacctaccacaccctggccgggatacgcctggtattggcggacggcagccgcctggataccgaagacgcggccagcgtggcagcgtttcgcgaacagcacagcgcgctcctggaacgcttggcgacactcggtcgcgagacccgggcaaacgctgaactggcggcaaagatccgccacaaataccgtctgaaaaataccactgggctgtcactcaatgccttggtggatttcgatgagccgctggatatcctcagccatctgctggtgggctccgagggcacccttgggtttatcagcgcggtcacctacgacactgtgatcgatcaccccaacaaagcgtcggcgttgattgtgttccccgacgtcgaaacctgctgcaatgcagtaactgtcctcaagacccaacccgtttcggccgtcgagctactggaccgtcgcagcatgcgctcggtacagaacaagccgggcatgcccgctttcgtacagcacctatcggaaaatgcctgcgcccttttgatcgagtcgcgtgcagcttcctcgtcgttactgcacgagcaactggcgctgatcatggcctccctggccccgtttccggtggagaagcaagtcgacttcaccgaagaccctgtggaaaacgcccgcctatgggcgatccgcaaggacaccttccctgccgtcggcgccgtgcgcaaaaccggcaccacggtgatcatcgaggacgtgaccttcccggttgaacaactggcaatcggcgtgaatcgcttgatcgagttgttcgacaaacaccactacgacgaagcgatacttttcggacacgcgctggaaggcaatctgcacttcgtgttcacccaaggcttcaacagcgcggaagaagtcgcacgctaccaagcgttcatggacgacgtggcacaactggtggccgtggagttcggcggttcgttgaaagccgaacacggcaccggccgcaatatggcaccgtttgtcgagctggaatggggcagcgacgcctatcaactgatgtggcaactcaagcgcctgctcgaccccaacggcattctcaacccggacgtggtgctcagcgaagacccgcaaatccacctcaagcacctcaagccactgcccgccgccgacgagcttgtggataagtgcatcgaatgcggcttctgcgaaccggtgtgcccgtcgaaaggcctgacgttgagcccgcgccaacgcatcgttatctggcgcgatatccaagcgaagaaacgcgccggtatcgacacctctgagctggaagccgtctatcagtaccacggcatcgacacctgcgccgcgaccgggctttgcgcccagcgctgccctgtgggaatcaataccggcgacctggtgaaaaaactgcgcagccgtgacgccgaccgcacgaaaaccgccgaatggctcgccacgcatttcgccaccgcgctgcaaggcgcgcgttttaccctgcatgtggccaatggagcgcgcatgctgctgggcgcgccgcgcctggcaaagctatcggccagcgtgaccaagctgtccaaggggcagattccgcagtggaccaacgccatgccgcagccggaaaaagccattcgcttcagcccggcggtgacggacgagcggccacgggtggtctacctggcggcctgcgtctcacgcgccatgggcccggcggcgggcgataaagagcagatgtcgctgtacgacaaaacccgcaagctgttggaaaaggccggataccaagtcgtgtttcccgacaaccaggacaacctctgctgcggccagccgttcgcctccaaaggttacgccgaacaggccgagcacaagcgccaggaactgatcggcgcactgctccacgccagtcgtggcggactcgacccgatctactgcgacaccagcccctgcaccctgcgcctggtgcaggacctgggcgaaacgcgcctggatctttacgaccctgtgcgatttatccgcacccacctgatggatcgcctcgacttcacgccccaggaagcgccgatcgccgtgcacgtcacctgcagcacccaacacctgggcgagagccaggccctgatcgacctcgctcgccgctgctccaacaccgtggtgatcccggaaggcattcattgctgcggatttgccggcgacaagggcttcaccacgccggaactcaactcccactcactgcgcagcctcaaggatgcggtgcaacattgcagtgaaggcatctccaccagccgcacctgcgagatcggcctgagccagcatggcggcatcgattatcacgggttggtctacctggtggaccgcgtcacccaggcccgcgctcactgatcctgcaaaaaaaacagaacccctgcgcgccggcgtagtcatctgcataggcctcgccaagcgaggtttatcagtgatgtcgctggcagcggttgaacgccagcagcgtcgagcccttttgcgcaaggagatacccgatgaagcgttccgctcttgctggcttgttcattaccgctgcgatgctggcttcccctgtattcgcggcgggcgagcccgatctgtgcaaaatcaatctggacaaaatcaacaacggtaaagccctgctcgccaccgacaccagcggtaaaagcggcgagatagacactgccgtctcccaggccaaggcggcccacgccgcgggtgatgacaaaaaatgcatcgagatcacctcgaaggcgctgcaagacctgcagaacagcgaaaaaggcggccaataggttgctcagtcacggaaggccaaccttcgggttggccttccgtgagcgtttggcgtacactgcataggcttgtcactcactaagaaacaacgagttacaagcacggggccgtttaggattcgacgccggtcgcgaaactttaggtgcatgccgagttggtaacagaactcgtaaatccactgttgcaacttcttatagttgccaatgacgaaaactacggccaggaattcgctctcgctgcgtaagcagccttagccctgagcttctggtaccttcgggtccagcaatcaccaggggatgtctgtaaacccaaagtgattgtcatatagaacagaatcgccgtgcagtacgttgtggacgaagcggctaaaacttacacaactcgcccaaagcaccctgcccttcgggtcgctgagggttaacttaatagaaacggctacgcatgtagtaccgacagcggagtactggcggacgggggttcaaatccccccggctccaccatttgatcatctaaagacgtccacggacgtctttttttgcgcctgaaatccagtaaatactgggctttcagcgccatcagcgtccacggacgtccaagagcagccacgctgtatggcattccaaatggcattccaagcccaacagtgctaatttttggaatgccaaccccatcctggaatgccaatgtgcgcacaagctactcgcctctctgagctcaaaatcaaatctgctaagccctctgagaaggactacgtcctgtttgacggcggcggacttcaaatgcgagtgagaagtaatggctctaagctatggaacttcaactatcgacaccccgtgacgaagaagcggatcaacatgggcctaggtactttccctgaagtttcgttagcgcaggcacgaaaggggtctattgcagcgagggaaatacttgcccaaggcctcgaccccaaagaacaacgagatgccgtgctgcaagcaaagcaagctgaaactgagcatacattccagaatgtcgcgacgtcctggtatgaactgaagaaggatgcggtgacaccagcttatgccgaggacatctggcgttcgttgacgctgcacgtttttccagacttggccaccacacagatttcagccatcagcgcaccacaagtcatcaaccttcttcgaccactcgaaaccaaaggtagccttgaaaccgttaaacggctgtcacagcgactcaacgagatcatgacttacggggtcaactcaggattgatacacgcaaacccactcagcgggattcgctccgtcttcaagaagccgagaaagaaaaacatggcggcacttgctccagatgagctgaaagagctcatggtggcaattgccaatgccagcataaaaagaactacgcgctgtctgatcgaatggcagctcaataccatgactcgaccagcggaggctgcaaccacgcgctgggccgacatcgacttcgagaagaggatctggacgattcctgctgagcgcatgaagaaacgccgcatacatatcgtgccgctcacagatcaatcactggcactgttggaggcaatcaaaccatacagcgggcaccgagagtatgtatttcctgcagaccgagaccctcgaacacactgcaacagccagaccgccaacatggcgctaaagcgcatgggcttcgaaggtcgattggtgagccacggcatgcgctcaatggccagcactattcttaacgaacacggctgggatcctgaattgatcgaggttgcgcttgcccacgtagataaagacgaggtccgcagcgcctataaccgagccgactatatagagcgcagacgtccaatgatggcctggtggagcgagcacattcaagaagccgctaccggaaatctttcggtagcggctatcaaacagtgtacggacaaaaaagtcattccaatacgttaagcagatagaaaacataggcgagcgtcaccaaaccgaggcggctgaaccgctctcagctcctctgtaaacgtaaaggcattgatggctcactggcccgagttttgtacagatgtcaattgatgcgaattagccagattggtgcaagtttatgcaaaaaccaaaatatcaaaactaatctttataaataataggcataaatgaatttctacatctcatcacactccaacccactggccaagcaagaccaaagctatgcctactatgaccaaaatgagtaagttatccgtgagagaaccagagatccaaaaagccttgcttcaagtacttattcaagaagagaatccagatgcgctagcgattgagtttccgtttgacttcggccgtagaagggctgatgcaatatgcattgccaacaaccagctttctggctacgaaataaaatcaatattcgacagggtagatagactgcccgaccagatcgagtcgtataaaaagctatttgattttgtatatgtagtatgcgacaaacaccactatagaaaaataaacaaacttataagcagaaatacaggaatatacatatttaatgatggaattatcactaaaaaacgctcagcaaagaacattcgaaacactgacataatgacaaccctagatgcaattccaatgcaacaattgaggactgacttcaagctaaacgccaactccaaactagagctttgcaaaaaaataaaagattcccactctcgcgaattaataagagaaaaaataaaaaattacataaccaataaatacgccccgcaaactacgacattccggagcgaggcaagccaagtattaacattagacgacatattgtcgctaaccctaaacccgcagaaactaacgccctaatacctccactctccgataaatataattattcacccttacggatatccaaaatgaaggactaataccagaagggctaccagccgaagcacttcgtatttcctcatcaccccacgtaaaaccattagaaaacctcacatcagcaacaactttcttcgcacacttaacatatgaacccttatcccttctataacgataatagtaaaataccccatcatcacagaaatcaatccttggaacaaaagtgccgcctcgcatttccgtctgatttatatttacagatgcataatccccaaacttaacaagatcatcctgctcattcagagcgagaaataggccatgctcgtaaatatcaaaactcccctcttcatccccaccaccctctttagaaacaaactgtggaaatgagcctgcaataacaactacactctctaaccaatcggtatcttcgccgatatcaagaactatatttttagccgactcaaagagctctacgactgtttctagagaatcctcttttacagcggccctaatacaaccctcatcaagcaaaacgtaaagctttgcttcgccaagctcatctagaattggctcaatcacttcagagtattcatcttcctcaagggaggccggtagacgtaaagccaaccgagggaatgcaaccgacataatactgacaaacttgagtgcgtttacgagcccaggatcctcatcgaaatcgatatgtatggtcggtacaatatttaactccgcgtaggatgtgagcatgtccctccaattcttatatccaccatcaggaacaagaacactttctatctgagagttcatctgcttaggatctgttgacacatcaagaataaatggcctctttccttgaatgagtgcaatctgatcaagccttttagacacatcaccgactggattatttttggatgttcttgactttgtaagctcatagacgggaagtatcttatctaacaccaaatcatccacgcatgatatagctctaagctcagcatcttttgtctttaacactggaaaataaacaaagctactccaatccatgccccttcatccctagcattttggctctaactcttacagcaagagttgaaactttaaaatgttttccaagctcttcaatactgccatcgaaaagcttgacgtattttctgaacacctcttccggcatcagaagctccccagcaaacctgttagcttccgactccattggactgctgtcaccattgcggaagaagttttgatctacaaactcagcttgcccacctctatgtcgcgaaaaatgtccaagctcgtgtgcgattgtaaatctttgtctattcggatgatgcagcgcattaactttcatcacccaatccttcccattaggcgcgcgacgcaactctccagacacttcatcattcataggtacgcaaaggaactgtattcctaagacacggacgagcgcatgcacatcaagcggcacagcttccacgccgttacgctttgctatttctagcaattgcgcaacggtcaaaagctcagccccgtcatttgtacgaggcgcgctaacggtttgagcggtttttggccttgaatttttacggacaaaagccatattctcgcctactcagtaatttttccatcttcatcagcatcatctgttctatccaacatagctacacgctggctaatagtcattatagcaccatcgattgtttttagcctgcttgaaacgccttctatctgatcaaataaatcgccataagtagagttaattttcgagatctctttcttggcctttcttttcaccagatctgtaaactcaccacttcttgaaaattgctcaaactgttctacagcctctttaattgcttctgctttcgaagaagctctaataataaaaaacgctattgcaaggattgctgcatttaaagcaattaaaacactaacaatagtttgataaaaagaaacctgcattgaccaaagagcatcaactgttatcaacgtcttttctttaaccatccttgaaatcaatatctgctcataataatcaaggtctttaatttcacgcagagggacatactgcccatgagtcaacaaaatttttgttagcggagaaaagtgaataatcgccaatgcaaaaacgagactaagcgcagtagaaaaaagagttgcaacaataaacccttttatgtcatggcgacccatatttactattatccttatataaacggcttacagagaggttcctattcaccctcggccagacgcaaaactactcgccatcctcatgctacaccgccttccaaccagaagtctcgaccaattatgccgctcgcgagtcacctaaatgtcagttgactgatggatatgaggctaccaagaaaaggttttggacctatcggtaggaaacgctcacgcgccctcccctccgctctctgaaacggctagttccattgaagaaaatttcagtcctacataacagcgatgacaccactaccacgaaggttcgccctatgtcattgcagtgccctcgctgtcactccccaaaagtcgcttcattccatcacgccatgaaaatcggcgcgaccatcggcaccgttggcggtgctgcgcgtggcatcagtactgcgctggctggcgttcaggctggtgcgtttattggcgctattgctggacctgtcggtatcacacttggctccgtatcgggtgccatcctcggtggcctcgccggcggggttggtggttgtgcgctcggcgcccaactcggtgagtcgctcgatcgccacgtcctggcccacaatctctgcctgctatgtggtcaccgctttaacctaccgacctaatccggtcaatctctcttctatctattacgtccgtttcggtgctgcgttgtacgcggcgctttatgacggatagcatccaaaggaatcacaaccatggctcatctcgtcgaaactatggcctacgccggagcaactccttggcacggccttggcaatcacctcactcaaaagcaacccatcgaagtttggcaacgcgaagccggcatggactgggcgatccaggaaagccccgtcctcttcaaatcagagaccatcggccacctgggcgcgatccattccttccccgaacagaaggtgctgttccgctcggataccaaggcgccgctgtcagtcgtttcccagcgctaccacaccgtgcagcctcgagaagtcttggagttttatcgtgacctcaccgaggtctccggctacgagctggaaacggccggtgtactcaagggtggtcgcaagttctgggcgctggcgcgcaccggacaaagctctaccctgaagggtaacgaccaggtcaacggctacctgctgctggccacgtcctgcgacggcaccctggccaccacggcaacacccaccaccgtacgtgtggtatgcaacaacaccctgacgatagccctggacggctcatctcgcgcaatcaaggtgccgcacaacacgcgtttcgatccaaagacggtgaagaagcagctcggcattgccgtctcgcaatgggacgattttatgtaccgcatgcgtgcgctggccgaacgcaaagtgcagtggcatgaagcgctgggcttcttcatgagcgtgctgtgcgagaccaatccgaccggcgtactgccggaggtactgcccaacgaacgcgccctgcgaaaggttcaggagctgtacgaaggtcgcggccgaggcagtcagctggactcggctcgcggtaccgcctggggcctgcttaacgccgtaaccgagtacgtcgaccacgaacgtcgcgcccgtagcaacgagtaccgcatggactcggcatggtttggccaaggagcgcagatcaagcaacgtgctctggacaccgccctgcaacttgtcgtctaaccggttacttcctcccctccccaaaacgcccgatcagcctcgttgctgatcgggcgtttctatttctgcaaggtgaacgctatgaacgctactccgttgcgcagcactagcaaggctcgtccagcgctgcgcctgatcagcaccaaggaactgcctcgtgaagattggctggcggtgcgcaagcaaggcatcggcagctcggatgccggcgctgcggtgggtctaaatccctacaaatcgcagttggagctgtggctggagaaaaccggtcgagacaccacactgccaaaagccgacccacatgatgaagaaagtccgatgtactggggcaacgtgctggaaccaatcgtggcctggcactacagcaagcgtactaaaaacaaggtgagacggatcaacgccgtactgcagcatccgaatccggatatgtcctggatgctagccaacatcgaccgtgaggtgatcagcgcggacgaggtgcagatcctcgaatgtaagaccgccggcataaacggggcacgtctctggaaggaaggcgtacccgagtatgtaaaactgcaagtgatgcaccaacttgcagtcaccggcaagcaggcggcagatgtggcggtgctgctcggcggtcagcacttggagatccatcgcattgagcgagatgagcagatgatcgcccgcctgatcgaactggagcgtaagttctggacctacgtggaaaccgataccccgccgccagccgacggcagtgcatcggccgaggcggctttgcgctgcttgtacccggaggacaacggtcagaccgtcgacttcagcggccatgcaggattgtcggaggcctacttagagctcaaggccgtgcgccaatccatcggcgagaaacaaacgcgcgaggcccaacttaagcagatgctgcagcaagccatcggcgaggccacccgagcggagttctccagcggatatatcagctggaagaaatccaagggctgcaccgtgctcgatgtcgaacgcctactgaaagagaaaccttacctgcaggttcgctacgccaaaacccaggaaggcagtcgccgcttcctgatcaactgactccgctattccttacttccctccccttggccagtccacgcagttagcgctgcgtagctggccttttttcattttcaggagaaccatcatgttgaaaggcttagccctaacgccgcccgtgctcggacgcatctccatcggcaaagtcattgaaagaaacggtaaacgcctgccggagaaagatgatcagttcaccatcacatcccaggtacaaagcagggatggctggctgctacatccactcaacgacgaactgcgccagagtaaggaagacaagctgcgcagtattcctatacgcctattgttcaacgaaccggagctgaatttccgggctgattacaccctgttcgaccggcagtccgggcgaccgttatgcgtgggcaatggtgaaacctgcaagcgcgctgcccaggacggcatacagtctctgccctgcccttcgcccgatgcctgcccactagccaaaggcggtgcctgcaagccttacggccgactgaatgtgattatcggtgatgaggattcgttgggtagctttgtgttccgcactaccggattcaatagcatccgcaccctggccgctcgactgcattacttccaggccatctcaggtaatcgactggcttgcctgcctctggagctgcgtctacgcggtaaatccacccggcaaagccatggcacgccgatcttctatgtcgacctcaccatacgcgctggcatggatatgagcgaagcgctgcagaaggcgagcgagctggatacacagcggcaaacagcaggtttcgatcagagggctctagatgacgcagctcgccgaggctttggcaacggcgccttcgaggacagcgaggaggacagtcacgtcgtgatcgaggagttcttcgtaaactcggagcccgccagcacctctagccagggtgaatcgcagtcagctcccaactccctcgcggcaaaactagaagccctcacgtcgcaggcccactgaatcaaacctgtcggtgccgtgtacatcggccagatacaagatcttggagtccagccatgtcgctaatgcgatttttgctctgcttgttcatattcgtcggcgcgcttgcagccgccggggcgctggtgctgagcattctgctcatgctgcgctttccagcgctgttactggccgttctgctggcctgctggatcctgagtcgcttgctcagactaatttccccaagtcggggaaatcccacctgaaatattccaagtaaccgtcagcggccatgcacacggccgcttttaccaggagaatgaatcatgtttcgatactgcttgatctgcgactccaaggccgtcctaaccagggaggcagccaaaggcatcgccatgttactcggcctgctgacagcgcgctgcgggaagcgcagaaatctaatgagaatacccaagcgccaggcagccatctgctcatcaatggattagccgctatcacttccgcgtatccaccggcgttgcgggtagccgaggatgtcgctaaatatcacttcgcggggttcaactgtttgtgcctacgctgtggtgctctgttcgacgagcctggggaaaaggaatcctctaaaacaacaaagcaaccgccgtgactgagccaatcagttgcgatcaagcctagtaacaagacgctccaccatgtccatgacgaagtcgcggtcatacgcctccagcctagacagcaagtcatagagcctgcgcgcctggtcctctgggcgtgaactcccctcggtcagcaggtcagccgtttcacaacgaaaaaccgctgccagctccgccaaacgctcgatgttgggcataacgatccctcgctcgatacgggatacggcctcgcttccaatgccaagcctttccgcaacctgctcctgactcaacttgcaacgagcacgctggcgagcaattgcttggccaacaagctcagccagctgcttcgatttggtttttgacatgcagccctccagttcaacctgaatggttggctatcaacccgttgacatgaaggacttactgggtcgagactcacccttaaaggttgtaattcaaccctttctcaaaaccactatctcttgcagggagctcagaaaacccatgatcgtcgtaacagatctgaatgaagcgcagattgaaggtctcgtgaaaaataaagcgtccttcgagatccatggcctcaggggtaatttcatggcaggtatcaaactggttgaaaccaagattgaaagccaggggctgaagtgtcgagtcaaaagcgatgtgaaaagtgcagtggtacaaggcggcgcactcggcgccatattcaccgttctgacaacacctgcaacattgaccatagcgacattaacggcggcagcaggcgtaggtcatacgctcgttacgtacaaccccgactacgaaatcatcaaggactacgtcaacaagcggctcaaggttgtttacaagaaatagcagctttgctcagccccctcgtcaaacccttcaagtaagaaataaaccatgaaacatatcctctgcattcttcttctcgcgtcctgtgctcaagccaacgccgaaatctccgcataccaaggttcagcggctttctttcccgacgaaaaatcgaaccacaaccttccggaagcgattccatgcgtcacccgcccagcagcgacgggtcaaccgatgctcttttgtacttggctcaccagcacgcgctacgtggatatctgggacgctcagcgccagcaaaacgtccgtatcaccaacaaggtcaatggcatgtgtcagcgtggcaactgccgaatccaaggtgcagaggtaggccactggaaggagaacaccccattccaactctccatctggtatcggataggcagtagcaccgatggcaaaccagttgcctaccgcaccgacgcgactcggcaagtatcgtacgttgaagctggcagtctattgatgaagttctacctggatgcaggtgtcccagagaatgaactggcttcaaccttcgacaagcgttacaccggcggttgggcagcgtggaatcaggagaaaggcgggaatgcatcaaaagcgacgaacaccccggctgctcctcagtccgaatggccagaagtcaaagccgcctggtgcaatccgcgcatggatgatgactgttacatcaacagcaaaaaagtccctattgccgagctgggcaaatggttaccggacattagcgaatcgaatgccgaccagctaggaggtcactgcgagaccatcctctgcttcgataaagatgaccaaccgatgggctatcttttgcaatgaggattcgagcaccgctggccaggctaagacattcgccttgctaatcctgaaagcagggggcgtaagccccctattagcttcacttcagttttatttttggcgaagttaatattcgcctcgcccaaccagacgactgcattttaatgcagccaggctcgtaagcagccagccatcgacgctggcagaagccgataacggcttttgccaaattcccctattacctatgtaatgtccgcgactacagcaacgccctaaagtgacgtttgtccgcgtccgaggacttgaggatgcggtattccatgccgctagccacagcgatctgctgggcaaagtccttcttggcttgcaccacggcgtcctcaacctggtagtcggccttaacctcaacgatcacgtacttcaggctgccgtccggctcttcgcgctcgaaaatgaagtcggggtagtagctgcgtacggtgcgcgaatctggatcgatgtactggataaagaagtcagactgcccgtgtgtcagcattccagtgaagtagattttcttcacccgctgctcacgcagcagatcccagaacaaccagttttccgagcccgaatcaaagcagtaagtgtcgaggtggaagctcttcgcgcgctccgcatcgctaatttttggatcgtcacgccggacgatcttgtccttagcggctgtgacctcgtagtagccgctgaccggcaccttaatcagatcgatctcccgttcctcagtttgctgcgtctcatctagatcgtaaagctgacgaaataggcgcgggatgatttcgtcgtaaagaagctcgttgaaatggtttgtgatatccaccaattcttcggtgccttctttggtcgaatccagcagctcctcgatttccaacgggctgcgattgagatagcgcgacacctcagcaaccagagtcatgcgcgagaaagtgcgcttctcacggcgcaccgtcaggtcgaaggtacggctgccagacgcacgagccgcatcggcggcagtcaaaccatcctgctgtgtctcgatcaaccggtacttctcaaccaatgtgctccagctttccttatcggcacgatcaagtcccaatgcttgaccgggcgttaactccttctcgctcacctgaaattgctttcgaacgcgcactagcttgatcttgaccggcggctcagtcacgcgcactactacgcgctccttatcgcttcctgtcttttgaagctcatcggcgctgattcggaagttctgctgcagctcatcattgaggatgttcaggttttcttcagataagaagacgtgcccggtgtgctgagcctcgccgatggagcgcaggcagcgcatcgtggcttgcaacacgaacaccttcgactttggggcacggaacaaaccaacgccgaacagagagcgacagttccagccctcgcggcccttgttaaccagcaggatgaactgcttctccgagctttcagtatcgagccggttgaactcgcgaatgtcgtcgttggtagtaagcttgttgtcgccgacgttgaccaagatgcgcgaagtcggaataccgtgcttgagcagcgcgcgctcgaccgccggtttcagttcgctagtcaactcatcaacggtggcggcgaagaaggccagcttgggcaatagaccctctgggcgaagatcgcccgattccctcaggaaagcctcaattgcgatgcccacaaactcgtcggtgcgggtgttggcatagccgtgcagcatcaccttcttgaggtaggccttgtcaacggcctctttcaggccgtaggcataaaccacctccggcagtacttcacgcccgacgtagggcgtaccggtgtagttgtagcaagccaccactcgggtgcctgctgcattaaggctggcagctaggatgtcaatggtggtgcgtaggctggtatcggtttccttagtgccgacacccatgtccttggccagcgccctaccgaaggcgtgatgcgcctcgtctacgtagatgcccaactgctctaggcggcgtaatttctcgaaacgctggttggtggtcagctcgccttcttcctcgggctggtcgaagttgtagaggtcagcggcgtcggcgtagacaccagtcgcagttagtgtttcaccggtcgcaccgaacagcttatcgacagagttcttttccttgtgcttgcgcttaaggatgatcttctgtgtattggagacaattatgttgaagcgcgaccgatccaacgtatcgagcgacgtaccagcctcttcgaggtagtggaaacgcaaatgcgtggtcaggaagtttacatattccggcggcacgacgcgggtcagatcgaaggactcgatctctttcaacgattgcagtacggtcttgtccggcgcaaacaccagcgcgttgtgacagtagcgcgcgtctttctcaaacttattgcccaacaggaactcataaaaaatacaggtcgccatcaaaatggttttaccggtacccatcgtcagcgcgaagatgtagttcggataaacacgtgagtttttccgcatcgcagtgaacacggccttgtactgatcctgcgtgatcttgtcgaacaagcccacttgcccagcattaccggacgctacaccgccttccgtacgatctgcgaaacggccctgcttctggaaccactgttgaaatacttcctcaaccttagcgttgccaaggaactccttaaggaaaacgtaggtttccagcgcctcgaactgtggttgccgtagaaaggccttggggttcttttccggattgttgaagtcgaggaacttacgggtgagctccttatagttctggcggatcacgcctcgattggactggtagaactgccagagaaactgaaagaaggcgaagtctagcgacgcactcactgccttagctgcgcgcttagtcgccatggctaatgctcccttcccaggactccgacagcaggtcagtgatcttcacgcgaatggtgcctgcgtcgtccggtaccttgtaagcgcccgtaacaaactcgttttttcctggaatgtccaccaccgccggttggagtaccgcaccgtcgtagttccagtcgatcaacacgctttctgccagctccttccaatcctggatcgactccttttggagcgagagcttttgcagcaaattcatcggatagaacctctcgatgatcaggtcatcgtccttaatggataccttagcctgcgaatcgcgcttgaattccagatccgccttgtcgcgtaagatgtcgaccacttccacatctatcttgaaaggtttggcagccaattccagttgggcggctaagtcgggctcatggcccatgcagacaagggttattttctcagccggtcgattcgggctttcattctgcttgcgctcccacgctttgtaatcgaagcctgcaatcaattcgttcagatccgcgcgcgtggcgatgcggttgacgggcatgatcttgatcatgcgtccgtccttctcgccatcaaatacagaactaaactccagcttctgcacttccagcgcctccaacagtagctctttggcttggaccgggttgcggaagatgtcatagtggtttacgttaaatatttcaaatccagctctgctagtttgatcagaggcaatacgaatcagcctttgtgttgttgtctgaattgcaccgaggtttatatctgcaccaataaatcgacgcccggctttcgtagccgctgcctgtgttgttcctgaccccatgaatacatctaacactaaaccatttgcaggacagccagtttctataattctccgcagtagtgtttctggcttttgggttggatagttttctcgctcttgcgcttgagagttaacgggctgaatgtcgtcccagatcgtggttagtggctgcccttcaagctcgtcaaagtaacgcttgtacctagcaactcctgaggaggtatatgcgagcaagccttcatcatgaagggcttgcattttttccttggtgactcgccaaactcgggttaccccgttccattcatactgcaaatttggtcgatcagggtttgggttattcatgttgtcgagtgtgtattttcgaccatcaccatcatcctgattaaaccgtgcaacatattcttccgaatatttaattctaggcggcgtccaacttgtattcgtgcctctggcatagcaataaatcgtatcatgagctgtgctgagacccatcttcacgtttcctcttgcagcagctcgcttccagataacttcggaaacaaagcgatcaggcccaaaaacctcatctagcaagcatcgaagttggtggctcttatggacatcgcaatgtaaccaaatagttcctgactctgtcagcagctcgcgcaagataatcaggcgttcatacatgtattgcagatagtcatcattcagccaaatatcgcgatattgcttttcttcaaatgcagataccccggagtccacccgctttcctttaagggaaatagtcttgttgtaatcgactcgggaatcaaaaggggggtcgatgtaaatcaggtctaccctccccctgaactgctttagcaaatgactcattacctgaaggttgtctccccagaaaatcttgttgcgccacccgtcgacctcttcgccgtggacttccttcaactgagcagggtaatactgcgtcgaagtaaacgggcgcttaccacgccagttaagcatcggatagcccttgattggctcgaattggtacttctcgacgttggtggcgtcgccatcaggcgtggccagctgcaagctttcctgcgctggggtaatagttttggtcatttgtcgttgttcctgaatttccaattcttgttgtcgcagtaagcgcgcatgtcacagttctggcacagcttggcagggcgcgcagcgattcggtagtcctgctgctctatgcgcgccacgatgtcgtcgaactgcgcgatcgtcttgccaatggagcgctcgtctttgctgaaagacacgtaggggttacctccgtcctcacccgtataatacaggtgcatccgactgaccttttggccggtacgctcctcgaccagatgggcataaacctccagctggttctggtattgccggagtcggctgcgatccttctccatgtcgggttttttctccgacttgaagtcgatgatctcgactgtgtcatgttcgccccgaatgaggtcaacgctgcctttgaggatgtaatgatccttgaccagcgaaatctcgacctcggcctccttgatgcgatcccagttgccgttctcgcgctcgaagtagcgcatcacgtgaagcagtgccgcctgctgcgagctgggggcaaggtatacgcgctccttcttggaaatctgggtgtaatttgccgagaaccaagatgcgatgagctctttagataaggtacattcctcaccgcgcagaactgttttgtgaatatcttcgatggtttgatgcacaagtgtaccgaacagcatggggctttcgcggatcggcgcgaactctaaatccttgaagaagcggtactgctcggcgcagttttcgaacacggtgatgtgcgaagtgaacgaatactcgcgcttgaggttaatctgcttaaccgcttcgtaactgaggctcgcgagatcaacgtcgcgccagctcggcaggtcgtagaacagtcgttcgaagtatttggatggcgatttaccacgcccctgtttctcttgcgcagctagcaccaacagattctgcgcacgggaaaaagcggtatagaacagtcgccagaagtcgaattttttgatgtggtcgagcggttcgaagcgctccttcgagaggtagcccccgtcttctagcaactcgtcgagtgcgctgtattgcttccttggtaccgcctccagcgacccgcagaccacgactgggaactcaagccctttggactggtgaatggtgaggaaagacacacagcccttgggcgcatactctgcctcatcttcatactcaccaatgccgccatccaccagaaagcgcaaaaactggttgaagagatcacgaatgttcttctctagccactctgggttgagcacgctgacgaaatgtaggtactcgaacttagtgagcagcttggaaaaagtgccgaggttgcgcgccgcacggcccttgtccacaccttgcactgcgtcctcggaaaggaagcgcgcgaatagcgggaactgaagcaactgataaaataggccggagaaggagtagtcggtgttctgagtcaatacggcgtgacgcttagccagcggtcgagcccaatccaacagagacttattctccggctttcgcagttccgtggtaaaggccgcgaaacactgccggtcgtagtagtcccagatcggtagcgtgacaccttcgacccacgcccgcaccttggggaactgcggaaacaggaagatcaacgcgccgatcattaggcgaacttcttcgcgcgcgaaaaacatgttcgagcgaggtgagaacacgggcaccccttcggtttcgaggaaacgcgccagcgcgaccgccttctcgctcttcaccgagcggaatagaaaggcgacctgattccagtccgtcagcttgcctgtagccttcatggtgttgaggaaggtcagcatctcggcatgccaatttttggattcgtcattactgtcggcggcagcaagtcgtaccaccgtagggacgtctgggaagtcaccctcacgcgggacaatctgcttggcgaagcggaacacacgcgtgccatcgtcccacgtctgctcgcgcatccattcgttgtaaaagcggatgatgtctggatgcgagcgataattgacggtgagcgccacctgcttgcactgtccctcatcgaagagcgatgggaattccaggatgttgcggatggtggccccacgaaagcggtacaagccctggtcatcatcgcccacaacgcacagattgcgcttctcgcccgccagcaacaggagaattcgctcctgaatggtgttggtgtcctggtactcgtccaccatcaggtaagtcagtttctcgcgcaattgcgccatcacctcggggtgcttttccagcagttgcagcgcctcgaactggataccagagaaatcgagagagttattttcgtgcaacagttcttgatacttgacaaagcaggcggccagcgcacggacctccacttcgggagccgccgccagcatagcgaggtcgagagcttcctcgccgaccttgttgagccacttgagcaagttctctgactgtgcccagcggcccgactggtcacctcccataatgagctgagcatcaggcagctcacgaaaatccttgatgcgctggtagaggaagtattgctgatcgaactgatcgaacagcgtaaagctgcgtttgagtcgtgtgaactcgcggaagtcttccaagatgcgcagacagatcgaatggaaggtgccgaggtacatctcattcaggttgaaacggatgcccagttctgcgagccggttcgagattcgggtggtcagctcgcgcgcagctttatccgtgaaggtcactacgagcagcgactctggtgacacccccttgtgcgtaatcagatagacaatacgctcgaccagcgtgaacgtcttcccagagcctgggcccgcaataataagcaccgggccgtcggtggacaggattgcttcaagctgctgtgggtttgctttactttgaagaggggttacaccagaggtcattccgtatcctcgttatctgccgcacatctgacgatgcgacgttctatccttcgagtcaggtctccacgacggaggcgcctggtaccacccagattcaagcctgacagatcaccgttcgctgcaagatgataaatcgtgcgtttgcttgccttaagttagttaggcagcagcctcatcgatagttagattctcgtctggttgggcgctcatctggtcacctaccaagctcaatggctggaatggtctattcgtgcatctcgtcatcaggtgtcacaattggccaaacctggtcaagtatggcatcaatctcgatactttaacgccgcattgagggaactttatggcgtccaactacgaagcgatctgtgaagaaaaccagcggcgctatggtaccgaaggcgctcagaaatccggagagctggccgctggactgtatgacgaccgcacgcacttcatcttcgaactactacaaaacagcgaggatgctatcggtcggcgcggtaattggcacggaccacgcaaggtcacgtttattctgaccccgacaagcctgacgctatcccacttcggcaaacccttcgatgaagcagacgtccgaagcgtatgtgacatcgcagagagcacaaagaacgagttctcaattggccgcttcggcctcggtttcaagtcggtctacaccgttaccgatctcccggagatacattctggcgatgaggacttcgccattgctggttatgtattcccgaaacggacggctcgcacggcacgtgaagcgaacgaaacacaaatcatcctgccccttaaaactgaggacacggccgcgccgcaggaaatcacagctgggttccgaaacctgggacctagcgcgctgcttttcttgcgacatatcgatgaaatcaactggagtgtcgatggtggcgcttccgggttctatttgcgaaacagcccggaattgctcggacacaacgtccagcgcatcacggtaataggccaagaaagcggccaacccgaagtcgatcagaactggctggtgttccaccgcgacgtattctccgccgaacagcagaaggtcgggcgggtggaaatcgcctttacgttagtctcggaaaaaaccgactccgaacgcttcggcgtgcaaccactgaccacttcgccactggtggtgtacttcccgactgtcgttgagacccacctaggttttcttgtgcaggggccgtatcgcaccacgcccagccgcgacaacattccgccctctgaaccgtggaaccaacatctggtcaaggaaaccgccaacttgttattggaggcgacgcgctggatgcgcgacatggcgatgctagatgtctctgcgctgagctgcctgccattcgaccgcgagaagtttccgcaaggatcacggttcgcacctatgttcgatgccgttcggcagtcatttcagaatgaggctctgctactcactttcgatggcaaatacgttaccggcaatcaggcaaagctagcgcgcacgcaagagcttcgagagctgttcagtccagaacagctcgcactactgtttggctcggaaatcgccatttggctgactggcgacattacccaggataaagcaccggcgattcttcagtacctaactcgtgagctcgacgtcgatctgattacaccgacaaaactaataccaaacctgactaagccattccttgaggcgcagcccgacgaatgggtgatgcgcctgtatgagtttctgggcggccaggaagcagccttgcgccgccgcctagacactattccacttatccgccttgaggatggtacccacgtcattgcccaagagaatggcgaggtgaaggccttcctgcccagcaccatcacaaccggctttccgacagtacgtcgtgctgtatgcgcttcgccagaagcacgcgctttcctgagttcgctgaagattacggaacccgatccggtggatgacgtaatccgaaacgtcttgccaaagtacaggcaggacgaagttaatgtggacgataatgcttacgctaccgacatagaacgcatccgctcggccttcagcacagactcggcgacacagcgagagaagctccgttccgccctgcgcgagaccactttcgtgatggcggtcgacactggcgacggcaaaggctacgtcagcaagcccagcgacatttacatcgccacggatcgactgaaacagctatttacaggcgtttcaggtgtcctaatcgttgacgatgaatacgaatgcctgcgcggcgaggatacacgggatctgctcgtggcgtgcggcgcaagccgttatctcagtccgcatccagccacctctgagttggaggcaaccgaaaaagctcagatccgcaaagaagcggggctggaacgcgcaagctgggagagtcggcctgaagattttactattcgtggactaacccaactactgaagatattgcccaagctgggagcagatgacgcgaaagccagggccggactgttgtgggactcactcgctgaccttgaagcacgcggcacaggtgctttctacggttactacaaatggggctattctcacgaaacgaaaacagctcgattcgatgcagctttcatccggactctcaaccaggttgcatgggctcctagtaccaatggagaactcgtgcctcccggcctcgtggtgttcgacacacttgagtggaaacctaatcccttcttgctgactaagctcgccttcaaacctccaatcatcgaccagttagccaaagaggctggtatcgatcccgcggcgcttgatctactacgcaagtacggcattaccagcgttacagaactggcctcccggcttggcatcaccagcccaccgcccgaagttgagtcggcatctgatgcggagcccgaagccccggaagaggcgggcaccgacgtttacggcaacgcgcaagatctgtacggcgacgatatgccagaaattccgccggggacatctgatcctgatggcggcgacggcgcgacaagtagtacgggccgtggtggtagcgggcacactggcttccgtggtgagaactcgggcaacgcaggcgcatacggtagctcaggagggagcaccaaccaaggcggtaatggcggaaccagtggaaatgggcaagggaaacgttctcccggccatgccggtggacgaccgtttatttcctacgtcggcactcaccccgacgaggagacagatctagatggcatcgaccaagcgatgcgcatgcacattgaggagcaagccattatgctgatcattgaactggagcctatgctgcgacgcacgcccgaaggcaacccgggatttgatctctacgagacaggtagcgatggtaaggaagttcgctggatcgaggtcaagtcgatgactggctgcctgaaagatcgcgccgtagggctctctcgtacgcagttcgactgtgcgagagagcgaggtgctgattattggctgtatgtcgtcgaatacgcgaccgatcctgttaagtctaaagtgctgagaattcaagaccccgttgctcacgcccggacgttcacgttcgatcatggctggagccagattgccctaaccgaaccgccgtattgagcggcatctcggtgattctcgactcaacaatgaaaccctccagaatgagggattcaaagcagccaacatcaatgtataaacacaccctagcctgcctcagtaatcaaaagtcagtcggcctggcctctacgtagacatttagccctcagcggcttcaaccgaagctgctgagcgtctttcaccaggtaacgcatcgccttatgtacattgcgccggatcgttcgatcgtttcgtaaaacgatgccgatcccacacgcgctttcgtatttttctttatcgtgattacagctattgaagtgaccctgccccctagtgatgcgcccccacagttcaccgacttgctgtgccttgtagatgtctccacgaacctcgttgccattgaagaagtaggccgcatgaatgtgatagccccgatcctccccttgctcaaccgcacagatgtaaccagtgagatgatcaaagatcgggttgcgctgatgctcggcaatcaggcgagccaggtcatcgaacacgtgctcgacacgcaacctgacctgggcctcttgtcggtagtaaagatcgatcctgataatgttggtgcgcgagtagcgttcaaccacagcatcggaataatcacaaacacggtcctcctgctgcatagcctgacgacgacggtcaccctttttacggcgataccatagctcaagcgtcaactgacggatccgtgctaccagcacgttcatgctgtgctgatggtctagccaggccgtgccctcttcattcaagcagacaggaccggtaggacgacgttccaacccaatgtcctgacaagcctccctgaacgcttgcagatgctcactgtagctgtattcaatccggtcatcgaacagatccatcatctgcccgatatgagtaaagtatctggagagtctggtctcctcaactcgctcataacctgtacgggtttgcctgaaccgaaatgctgggctgtcatgctgctcgatggcctggacaagtcgttcaatctgaatggcgatgtcggactgggaaagataggtgtagatgttgcgcttggtcatggtgacgtgcctgattggtggtttgcatatcaggtacgtgcgctatgtactttttaactgatgacctatcgctagcttgaggtaggtggtgtgctgctgagccagataacctattgaatagttagtttccgatagttaatagctatataactagaagcacctcgtcccacggtggacgatcccggccaggcttggcattggggagctacattgcccagccttccgagagagtgcctcattgggatcatgagagagttagctgagaatgtaaggttccgaccagcagcataaacaccatgaccagctacaaaccggtcatggcgtttatgctggtttctagctggccatacttaggtgtccggtggaccgcactgcagctccctcagccaggtcacgctcttcgatccgtgccaggatccaatcgtgcacctcgctatcgacccagccgacgcagcggtcgccgagagataccggtttcgggaagctaccttccgcgatgtatttgtatatggtcgaccgggcaagacctgtcgagtcgatgacttcttttaaacggatgatcctcatgaacgggctcctcgtattcgttcagaggattggcaggggcgataaaaaataaccgcctaaacggctgtcgctcgtgctggcgtgagcaaccccgctttctctctaagctcctcagggcaaagggcttccgtagtaatcttcgtcgttccagcgtgctcgccgacttccctcagcagccagccaccgccagcgcccccatctagcaacatccccaaacaggaataacctagtcgcagatcactgggtagaagtctgaagttcaggcttgaccaggcaagtccatcaatccgtgaaaagcgcaccttgcacacccgtgcaaactgaatagtcatctcccaaagaaaatctatgatctcagtctcgtcgagcgagctcgcatcttcaacatccctcattggcttacgaaaaaatgcgctgatgtcacctcggacgccaaggaaaaattctgatttagctacatctagctgctcccagtgccgcgccagaaggtctgtcacgcaaccgctcagaaaaaactggagttgctcaatcgcgtgtctcggagcacgcctaaaaagacggagaaccgaggccggcgtggaaaattcaggcaatgagtatttatgcttagtagcggaattacgccagcgctcaagatcaaaccaaacgtcccctatataccgcacatcatcagcccattcgtccgcacactcatacacaacgaagccgatcttgtccgtccccaaggtggtttgccgatggttcaggttaaggacataactgcttttgagtttttcagcataaatggggctggcgactccgggcacgtgtcgccgaataaaccccatttcaacaagcttcttaatccgctgcttaagacttatctgctcaaggccggtaagtcgacatagctctacattcccgagcgaatttactacgccaaaacggtctgcatgagcggatagcactgcaagcagaagtcgattggatcgactgagcagtgaagtgcggttcggcactgctgccctcgtttgctccgccttcacagtaggcatcgaatagatttccacgtcgggcctagtggcgtgaatgtaaggccccttgattaggtgctcgacggcgccaaagtgcggcgcaagatcgatggggcgcgaaatcaaactcgcaatcccgagcttattgaccacgtcgtcatggatgcgaaatgattttttcagccgaccggctcgttgagccaacgccgttgtagcgatgaggatcgattcttccaagagcgagttgagcgtattagcacattctctcgtgggcactccaaggcaaccagccagctcatcaatagtgatcggccctgtggcagtgaactcataacgcagataaaacgaagccagcgtgaaccgagccttcgaatcaagccgccctaaatccagtgataaaatactatttagcatatgaattccgaaaataattacagctaaatataccctattttttcaagcgaaatctaataacgttattcataacgttatcaataatgaatatactggccctaaccagttctccagcaggaatagatgaaaatgggacgcaaaagggtagttgggctggattggcttgatcctgaaaatacgaatcaacgcctttgggccttgaagtatttgcaagcgaaaggcttagagcgaattttcgatagcggggagaggatccttccgaatgagcttccgtcccacaacgaaatgctggatgcaggcatgtatatcgagcaggacgctggcgcgagcaaactatttcgcgacatgaaggatgcttggcgccaggagagagacagaaacaagaaaaaggagagcggccgccaagtgtgcgcattcactctgagtacagccaccaagagccatctacaaaccatggccaaagagcaaaaaaagagccccgccgtgctgctggaaagcatgattacaaaggcttacgcagcccatgtgcgcagacagcaaaggcaactgccgaaacaaactctgcaagggaatcgtcagcacacaattcaagaccttcacgagatgttcgtcggaggcgccatacaatccgataactcagccatccccagccactccttaactgaagaatcgatgggtgaacatgagctgccggagcagaagtcaggcgagtacacttcggtagcttcaaatgagcgctctagatcgaagggtgccccagaaatcgttgaatctctgcttgagcaggaagaggctattaccctcattccagattcatcgtgcaatagtcaaatgccgtccgcggcggcagaggatgatcagccagaacaagcagcaccggtggacttaaattcaagcccgaccgatgatttcccttacgctcaaaccgaaaacccttcatccgtggtgaaaatcagtccccaaaagagaaaaacgttcaggttatccagcgttcgctaaccaaaagcctgggacaaggaacaacgtgattaactgtccgatctggagcgacatacaacgtttggcattccaaatggcattccatgcaaaaaataaaaccgatctttttcttaataaacaacaacttacatatcctgttcagattaccccggcgcatcaacagaacccgcccagtgcgggttctgttgtctctagggtttgaaaagcccgacaggacagaccttcagaattttccttcaagctatcgcgcccttgatgaactagcgcaccccgcgccacaacgctaacttcctcccgtcgctcctaatcagcgaccggctttgacaggccgaaaagtgtaatctttcacaccccttgataagacggcatgctttacgcattccgcctcgttcatggcggctgtgcgtggggcatcttcgggtgcgccgggttcctacacttccggtctgtcaacccgcgtacagctgccacccattcctgtttgacagcaggggcggtagctccttaaacagtgtgggagcttcatcatgaaaaagatcacccccaatcccccctccacaaccctcttcaccctcgccccagacatctcccccgaaaccctgctaatccaagccagcgaaaccctcgcctcactcaacgccatgaccaccgacctggccttcgaactcgaaggcgcccaccgtcacaagctgctggccactcagcaactgatcgtgctgggcgaactgttggtggagcgagtgctggtcctcacccaagccccccaaacattccagtaacaaaaaaggccgaggaaactcggccttttgctgtcatctgcctcagaaatcccagcgcgtcgtcaccatcacattgcgcgggtcaccgtaatacgccgagtcatagaacccgatattggtgaagtatttcttgtcgaacaggttgttgacgttaagcgtggccgacaggtttttcgtcagttgatagcgcgccatcacatccaccagccagtacgggtcctgggtgaatttttccgagcggccaccgcccggatagccccagttacgcacggtttgccaaccggcgctctgccagcgtgtgccaccaccgagcgtgagtttgtccaggctgccttggagtttgtaactggtatagagggtgacctgatcctcgggctcccaggtcgctacttttttgccatcggcatcacgcgcaatcttgtgggtatagcccgcctgcaactgccagcctggagccagttcgccggagatttccgcttcgtaacctttggttttgctctcggtgcccatgtacgaatagtcgacggccggctgggagttccaggcggtatcggcgattgggcgattggtctcgtgcacttcgaagtaggcgaggctggcgttcaggcggccatcgaagaattcgcccttgaggccgatctcgtagtttttgccttcgtccggttcaagcatggtgttggtgcggtcgcgatactgggtctgcggcttgaagatttcggtgtagctggcgtaggcggtgaagttttcgttgaggtcgtacgtcaggccggcgtacggcacgaccttaccgctttcttcggtgtcgctggtgccggtgacttgatagttggccacccgcgtgcccagcaacaggtgcatcgcgtcggtcaggctgaagcgcccggtgatgtaggtgccggtctggcgcgtgatttcatcactgaagcgggaggccttgccccatgccggttcaatggcttcgccgtgccagttgtaaaagtcataggaattgttgaagtagacagggttacggtaatccttgcccttccagcgagagctcgacacggactgcccgatcaccaattcatgctcacgcccaaacagttcaaacggccccgacgcgtaaacatccaggctgtcgctggtggtgtcgccggtgtatttggcggcatagatcgaactcgccgtcgcagaatcctgggagatgtagcccagcggcgcgtcatagccattgacctgatggttgtactggcctttggtgacccagccgttgtcgaagctgtgttccagggtggcgaacacggtgtggctgtattgttgccatgaaccccacttgggcccgttgttgaacgagcgcggcaggtcgagtttgttgccggtggcgtcgaagatggtgcgggtgccggtccagctggaacctttggggtcgctgtcctggtagtcggcgcccagggtcagcagggtgtccggggtcaggtcgacttcgaggatgccgtagagcacgctggtcttgcgtgagtagtgatcgaggaacgactttctgtcttggtatgccgccaccgcgcggccacgcacgttgccggtgtcggtcagggggccgctgacgtcgacctgggaacggtagttatcccaggagcccgcgcccagttcgatgctgcttttgaactcggaggtcggtttcttgcggatcaggttgatggtgccgcccgggccaccggcaccggtgagcaggccggtggcgcccttgagcacttcgacgcggtcgtagatcgccatgtcagtcatggtctggcctgccgagtattgggcgtcgcgcagggtcggaatgccgtcgtactggaagttctcgatggagaaaccacgcgagtaatagttggtgcgctcggtgtcataggtcgacacggtgatgcctggcgtgtggcgcattacgtcatcgatggagttgaggccgaagtcatccatgacctggcgggtgaccaccgagatcgattgtggtgtttcccgtggtgtcagtaccaggcgcgtggccgtggcgatggtgcccggggtatacgagcccgtgccttcggtgaccgtgccgagttggttggcgctgacttgggtggtctgcaactctaccttgccgtcctgggacaacggcttggcgaccacgcgatagccaccctgctcgtgctccgcctgcaagcccgccgggctcaacaggtgctccaggccttcgtccaccgagaaattacctttgagcccattgctctgaatgccggctgccagcgccgaatcaatgccgatcatcacgcccgcttgctgcccaaaggcccccaacacacggtccaggctaccgggcgaaatgtcatacgcacgaggttgggattgttgctgggtaggcgccgcagtggcggccatgatgctgtggcttgcggttgccaccgataaaccgaggataacggtgcgcaaagcgctgacgcggctgagcataaagactgtcctgtcgtgaaagggttgggtggacgcttttttctgcgtcttacctgtcttgatgctttagatgggaaaacctgccacgcggtgaacactatttttcggtcaggcgggcacgacggtcgccaggtagccaaacacccgctgcacgcgcacgggcagcaccttggccagcaggtcgaggctggcttccggctggtccagcgagaacgagcctgacacctgcaaactcgccaccgcagggtcgcagcgcagcacgccacgccggtagcggtcgagttcttcgagtactgcgccgagcggcatgcgctcggcgatcaacaggccttgggtccaggcgtcggcggtggatggcacggctgctggctgactgctctgaagacgattgaagatcaattgctggccgataccgagttgcgtgccgacaccgtgcaacggctcgacagaggcgctgcccgagagcatctgcacccgcgtaccctgctggcgaagcaggtcatggctgatgatgatctgtgagaatgccgcaggccgtacccagccattggcagtctggaccgcaatgtcggcgcgcgtgcctgtggtcaacagcagccgaccgaggttcagcgccaagtgggcgccacggatatccacagcggtgcgcgtatccaactgcaattccccggcattggccaggcgcaggtgccgtctctccccggtagcggtgtggtaatcgctgaacagctccggcaacagcgcccgctcgcgcacactcaggccaagggccgtggccacgctcaggccggcgaggcccttgagcacggtgcgccgcgatggaccactgcgtgcgcgcaacaattggcgggcgctgggcgcgggcaatgtgtgcgtgtggaggcgcatgtcgcggctgagcccagccaagcgctgccaggccaactcatgttgcgggttatcgttgcgccactgctggcaagcctgctgctcggcggcgccgcaggtgcccgattgcagcgcgaccatccagttcagcgcctggtccaacacgtgctcgtccagaggctgattattggcgggcttgaaacggttcatgccgcgtaaaccgccaggtagcaatggcgataggctttaagcatggctttttgcaccacattcacgctgaggtccatgcgctcggcgatctgtggataagtcaggccatccaactgggacagcaggaaaatctcgcgcaccttgctgcccaacccgtccagcacctggccgacggcgtccaacgcttcaagcaccagcaaacgggtttccggcgacggcatgtgttcgggctccaggatcatcagcgactgttcatacgctcgctccaacgcctggcgacggaagtactgcccgcataaacggctggcgacagtcgtaaggtaggctcgcggctcacgaaaaaccggcacgctgccgctgctcaggatccgcacgaaggtatcctgcgccaagtccagggcctgctcttgcccacccagcttgcgccgcaacaactgcaccacccagctgtggtgctgggcgtagagttcgcccacaacctgatgggcagaagaagatgaggccatcggtgcgatatccaggggacggctaaggaaagtcacacatgataatacttctcattagagacgggttaggagtttctgtcttacctgaagaatgctgcgagctgttgcaagtcaccgatatggactacacccgcttactcaagcagccagaaaagtcctgcatgttggcgcgccgtggatgaactggcgcgaactcggttgctcgaatagtcttcagaggactgctcgtctgccgaagattgaacgcaatcactcaagcccccagactccagcacgcccattcacgaataaggaggcccttcatgcaaagcactgtctcgcccagcccccttgtgggcgtcggcctctatacccccagtgaagcctccctttacaccggtatccccgccgcagatattcgtagatggctattcggttacagttccaacggcattcatcatcccggcctttggcaatcagaactgatggatgtgaacgaatacatattgagcttccatgacctgcttgaaattcgcttcgtgcacgcctttcgtcaacacggcgtgagcctgcaagccattcgcaacgcctcccgacaagcctcagagctgttcggtcaagcctacccgttcacctgcaagcacttccaaacagatggtcgcagcatctttgcgactgttctggatgagacaggcgacgagacactgctggacctgattaaaaaacaatacgcgttcaagcacgtcatcagcccatcgttgtacgaggggatcgactacaccggcaaaggctcggcccaacgctggtacccagtcaaacgcagcaagatcgtcgtactggaccccgccaggaattttggaaagccggtactgactggagcgggtatcgacaccgcaacgctgtttaacgcctatgaggcggaaggaaacgatacaaaacgtattgccctgctatacgagatcccaccctccgctgtaagagccgctatcgagttcgagcaaaggcgcgcggcttgaatttccttctggaccacaacctgccacctgcactggcgcgagcattgaatgaactttcaaaagtccatgagcatggcgtagttccgctcagggataaattcccccagaacgcaagtgatgtttcctggatatcagtgcttcgcgatgaaggtgattgggtcgttatctctcaagaccgctttaccaaagggcatgcagaaaaacaggcattccgagactgcgggctccccattttctgtctggcgaaacactggaataacgagacctattggaacaaggcgcacaatctcgtgcgatggtggccggccatcatgaatcaatcagcgttgataagaggagcagccgcattcagcgtgccatggcgtttttctgcgcccgggaaatttgatcagataaaaatgtaagcctgcaacgcaaaacagtccctatctggaatcccccccccacttacgattaccctgctcccctctatcagacacccggaagtccgatacccgtgttcaagccactcgccatcctcacccttgcctgctcccctctgcttgcaaacgccgccgacctggccggtgtctggaccggcaccttgggcaagtccgcgatcaccgcctgtttcaacggtgcccacggtgccaatggcagttactactaccaacgcatcctgacgcccattcagctcactcaagccaacgccagtgagccgtgggccgaggaagggcaaaccggcttctggcagttggatgagccgcagggcgacacgctgaccggcatctggagcaaaaccctcggcggtaaaagcctggcgctgatgctcaaacgcgcggacaccgacggttgtgccagcgatgcctataacaacgcgcttgaagccgtgccacccgcggtaaaggtcgagcgaaaaaccttcgccgaacacgcctatcaagtaaagacccaaggaggccaggtcatcctgaaacttgaaggcgacggtgcggccatcgacaagatcaaccgcgagctcgcgcgcctggccatcaacccggacggccaggccgatttctaccgggagcggcgcaactcactggaccagagcggcggcaccactaccagcgagatcgcggtagagccgttctactggtcatcgcaatggatcaccgtgcggttctatcgctggtcggcgggctacgggcgggggggcatcagctggggcctacacagttggaacctgcaaaccggtgacaaggtcgacccctggacgtggttgggcggccatgagcaatgggacacgccctactcgggccaggtcaagttgccggctgctttcagcacctggctgaccaagcagaccaccgccgacgaagggtgcccggctgtgaccagttattcctcgttcgacttgagcttcaacacccagggcctgcaactgtcgacgcccgcccagggcgatggctgcgataacgaactgagctttacctgggagcaactggagcctgtgctgaccccggaaggtaaagccgcactgcccagcttgatggcgccgtgacctaccttacaaaaaacccacattcgttcacgaaatattcagaaacgccgacggatactagcccattgcaatgaccgttcccccggacggtcctcctgccctggtagccacactccatgacgcgtcccgctcccctgctgttcctgcttgctggtctgttgttcttctttgccctgggtaaccacgagctgcaaggctccaccgaagcccgtgtggctgggatcgccatggccatgcacctggacaataactgggtggtgccccagttgttccgtgaacccttcctggaaaagccccccctgagcctgtggatcgatgccggggcgattcgcctgtttggcggcaccacctgggcggtgcgcctggcttcggcatttgccgggttgttcagtgtgatgctgctttacacaatgctgcgcaggttcggccgaccgcagacgctggcgttcagcgccgcgctgatcctggcgaccatggccagttattggagcaatgcgcgcggtgtgggtgaggattcgctgctcaccctcggcgtaaccgccgcgctgctggcgttttaccaggctgtgcgacccgatcgtgaagggtcaagcacaggcgcatgggcactgtttaccgccgggatggtgatcgccaccctcagcaaaggcgtgctgggcctggcgatgccgggcattgttatatttgtgtacctggccagcaccagcgtcatggacaagcgcctgcgccttggcgactggctcaagcccgcgctgttcaccttggtggcgctggtgccactggtgatctggctgggcttcctgttccagcgtggcggcatgcaagcggtggccgaagtgttgctgaccaacagcgtcggccggttcagcggttcgtttgtcgaggccgggcattacgagccgttctactactacatcgccaagctgccggaggcattcctgccctggaacatcctggtgtacctgggcctgtggcacttccgtaaaaccctggtgcgcaaccgctaccacctgttcttcagcgtctggctggtggcgcagttcaccctgctgaccctggcctcgagcaaacgcacggtgtacctgatggcactcgcgccagccgccgccgtcctggccgcggagtatgcacgagtgctgctggcgtggctgaaaacccgcaaacctgcgctctacacacatcacagaaccctcgtgggcggcgtgttcaccctggccgtgggctgctatctgattgcagcgttctggtttgcgcccaaggccgatgtgcgccagtcgttcgtcccggtgatcagccaggttcaggcgtttaaagatgaaagcagggaggtggtgctgttccagcccaacgagcgtatcgccggggccagcgtgttctatctgcaggcctacttgccgatcctgaagaccgaggccgagctgcacaactacctaggcgccaagcccggcaacattgcgttgctggaccataccaacgacctggccaccccggtgaaggtgatcaagcagatgtcgatcaaccgccagccttactacttcgtggagcagtaaggccggcgcggggcatcagtgtttggtgaccttgtccaggtaacccatggcaaacgccgagaccacgaaggtcatgtggatgatcacgtaccacatcaggtgctgcggatcgacgttcttggcgtccatgaagatgcgcagcaagtggatggacgaaatcgccacgatggacgccgccactttcatcttcagcgacgaagagtccatggtgcccagccagttgagtttctctttgttttcatcgatatccagctgcgagacgaagttctcgtagccggaaatcatcaccatcaccagcaagccgccgaccagggccatgtcgatcaacgacagcagcagcaggatcacatcagcttccagcatggaaaacacattgggcaagacgtggatgatttcctggaagaacttcagcgccaggatcagcaggcccagggaaagccccagatagataggcgccagcagccagcgtgaggcgtacatagtattttcgataaagcgttccattggatctcacacagcttggctagaaatggcggcgagtataccagccgctacaagacagctgtaaccacgagaaaactgacctgtgcggcatctgtaagagaatttttctgctagtgtcgagcccaataacaactcggctcgatgacgtcggacaggaaaaactcagatgatggatgtgcgatcccctttggccagtatcggcctgtgcgcggcattgctgctggctggcggctgctcccccagtgacgagcagaagcagaccaccctcgaagagaaaaccgcaaagttcgaacactccctggacagcatccaggaccccaagctgcgtgacgccgtcgccgacctgggcggttcgctgctgctgctggagcgggcgcgggtcaagctcgccagcaaacccatcgaagccgagtacggcgaagacaccctggccctgctcaagcactaccccacgccccaggcgctggtggacacctatatcaatggcctgttcgtgctgcgcaagacctcccattcagactacctgaccgacttgcagccggtgttcccgttcagcttcaacatgcctgaccaattccctttcccccatggcctggagtggcagtcggtgaccttgagcaacaacaaggtcatccccttccagccggaatggtcggaaaccgatccgggcatccagctgagccccagcagctccaacctgactaaccccgacgacctgacggtgacctacccgttcatcgacggcatcgagacggaaaacaagagccagccgcagcccgtcagtctcaagggcacggtggaagtggtcgcgccgggcaaggtgttgacctttgacctgtcgaaaaaagacgtgggccacaaacgcaccgagggcaacatcaccctcaacctgctgctcctggaaaaaaactacgccgagatcgagctgaccaacagccagccgctggcgcctgaagtcggcgacgaatcgcccaacccactactggtacaggcacgcgacagtaccgggcaattccttacgcgctccggctcgatcaacgaaagcagcgcccaggtggcgttttatgagaaacaactggccgagatgcaaaagcagaaggcctggtcggaggcgttcgaaaaacagctcaccgatgagcaaaaagccttcgaacacaaacaaagcagccattacgccaaggtgtatttcaatggcgtgatcgacaacctgcaggtcaacgtactggacttttccaccgccacccgcacgcgcaaagacctcgacctgcccgtgatgcgcttcgacaagaacagcctgcagaacagcgtccaggccctgccgatgccggtcaccgtgtatgacgacggcgccgccagctggctcaaagacgcgggcatgaccgaggaccaactgaaaaacagcgtcaccatcagccagtcggttgaagacgccagcgccgcacacatcgtgttcgaccacccgttcaccttcaatgacgacctggtgggcagcgagcgcaacagcagcgagtcgccagtgaccttcttcaccgccgacgaaaaaggcgagcgcggtgagccgatcgaactgccggccgaggcgtttgaattgaacccggcacgcggcaccctgacctacgacctgaacctgttcccggaaaacccggcgtatgtggtgggctcgatcccgctgttcctggcgaccatcgacaaagccgagatcgacgtgaccaagctgcccaaggggctgtcgctcaaggacaacgcgctgatcgtcgaccagaaggagttccccgccgacagctggcgcttctacgccaaggacgccagcggcaactacctcaaggaaatcctcggcgtcagccaccgtgccgaggagtacggcacggcgctgtttgacgtgcattacttctacggccagccgaccgccctggaaagctaccagcgcaccgacctgagcaccgtgcaatacggtttcgaggtcaagctggacaagcccgagggcaaatagcgatcagtgctgggtgtcaccattgagctgtcgcagatgggcctgcatgtgcaggcaccagatctgcgggtcacccgctttctcgtaaccgtgctgggtcaggctgtccacgatggactccagaatattttccgcgacgaagggcccggggaacgggccttgggacttgatagtggaaggctgttcaccggtcattccggcggcaaacaacaaggtccacatcccgttatcccccgcaagagggcgaatggaacattcgatacgggtgaccaggccaaagcactggcgggtaaggcaaaggttgcgcggcatggcggcgaccctcggtagatcggtgttcaacctgcgcctggggcgaggctgtttctatcccgcgactcctgtggatatcccttgagcacagaatagaagaaaaccacgacaaaccaagattgtagggaccaacgggcgttggccctacagtcgcgccaaatttgtgacggttttactggtcatgtggtgaggggattgttgtggctatggggcttgttgtggcgagcgggctcctgtggtgagcgggcttgccccgcgttgggtggcgcagccgccctaatccagtcgccgcgttcttccagacagaactcagttgtctggttttggggccgcttcgcagcccaacgcggggcaagcccgctcaccacaacaagcccgctcaccacaggagcccgcccagcccaataagccactacgccgtcaggtgggcttggcttgcgccaacgcctcctgcgccaactccttttccgcctccttcaggtcatcctcgctgatcatctcggcaatcgcgcgcaaccgctctaccacacgcgcattcaccgtgccctccgggaactgcccttcggcatccggctcaccggcaggctcgcccaccaacaggctcaacgcctcgtccgcctggcgcacggcatagatatggaactgcccggcacgcacggcctgcagcaccttctcatcgagcatcaacgtggcgacgttggcctggggaatgatcgcaccctgttcaccagtcaaaccgcgcgcttcgcacaggcggaagaagccttcgatcttctcgttgaccccacccaccgcctgcacttcaccaaactggttgatggagccggtgatggcgaagcattgcttgagcggggttttcgacaaggccgagatcaaggtgcacgcctcgccaagggaggcgctgtcgccgtccacataaccgtaggactgctccagcgcgatactcgccgagatcgccagcgggaattcttgggcataacggctgcccaggtaaccggtgagaatcatcacgcccttggagtggatcggctggccgaggttgacctcacgctcgatgtcgacaatgccgctgccgcccgggtacaccgtggcggaaatccgcgccggcacgccaaaggccgagtcaccgacttccagcaccgtcagcccgttgcacttgcccaccgctgcaccggcagtgtcgatcaggatgaccccggcgagcatgtcgtcgagaatccgcgccgacacccgcccagtgcgcgtggccttggccttgagggcgcgctcgatatgcccggcatcggtcatttcgtcgcccgccaggtggcgaatgaagtctgcctcgctgaccagttggaacaagtcaccaatgcgcgccgacaagcgcccctggtgctccgccaaccgtgcgctgtaagtcgccaaccgcgccaccgcgtccgaagtcagcggcgccatgccttcttccgacgtgcgagttttcagcaattgggcgaactgctccaggctttcgtcgaccatcgggatgtcttcgtcgaagtccaccagtacgcggaacatctcctgaaagtccggatcggcatcctgcaaagcgtagtacaactggcgcgaaccgatgatgatcaccttgacctgcaacgggatcatctgcgggttgagcgtcacggtggccaggcggcccagctcgcccagcggcgattccatcttcaacttgcgcgattgcagggagcgcttgagagcgtcccacacgaacggctcgctgagcattttttcggcttcaagaatcaggaaaccgccgttggcacggtgcaacgcgccggggcgcagctggcgataggtggtgtagagcgcgccctggtcggtgctgtattcgatgcggccgaacaggttgtcgtaggtcgggtgcggctcaaacaccaccggtgcgccgccgttgaccggatggccgaccaccaggcttgggcagtactgctcttcgagcagcttgcgcgcctgggcgtcggttttggcgtcgtccaccagttgctcgaccacggtcttgagcaagtacacctgcatggcttgcaggtaaccgcatacgcctgcgttttccgcgtacttttccgacaacggtgcaagcaaaggctgcaaggccagggtgatggtttcttcgttgaactggcgcagttggttgttcgactcacgcttccactgtggcaggctcgccagttcttcgttgaggcgctcttccagctcggaaatatccgtgtggaaccgctcgcggtcggcttccggcagctgcgagaactcagcttcgtccaacgccttgccgtcgagcatcggcgtgaaggcaatgttggagctgtcgcggtacagcgccacatccttttccagggccaggcgttcgatcacgtccagggccttgtcgtagcgctggttgaaggcgcggtcgatggcgctcttgcgctgttgatacgtcgggtgttcgaaggccgccgggaaggtggctgcgaggttgtcgatcaaaccgttgatgtcgttgatgaacgccgccgctgcgccgccgggcaattccagggcgcggggttcgcgaggctcatcgaaattattcacgtagacccaatcagccggggtctgcaggcgtttgccttcggccttcaggtagcgtttgacgaacgaaaagcggccggtgcccggctcgcccatgacaaacacgttgtaaccggggcgcggcatggccacaccgaactgcaacgcttcaaccgcacgttcctggccaagcacaccgcgaaagggctccaaatcattagtggtcgagaagctgaactgttcagcggagaaggggcgagtcagcgcttcgggcgctagacgcaagctggcagcaacaggatcaggcatcgggcttccttacatcaggcggggcagatgacggcattctggctcccggttacgcgctctggcaaggcgcgcctgtgggaaagcatagacacgggatgcgtcccgcaaaaaaatcgcgacatcgcggattgttttataaaaatgcacggaacccttggaacgtgcctaaactccaaactgcgcgggttggactaataactggcccctagggcgctgcgaagcgcctgaacccttgtccattggtttgcacacaaagagaacaaagctatgaaacggatccttctcggtactctcttcaccgtcgtctccctcaatgcaatggcagaagcaccaggtggcccgaactgtggttggggcaacatgttgttcgaaggccagcgcggcactccagctcacttcctggcttccaccaccaacggtacttcgggtaacgccactttcggcatgacctcgggcaccaacggttgcagcaccaacagcgccctgacttacggcggcaaatcgtggattgccatgaatggcatgatgaacgagctgtccgaagacatggccaagggtaatggcgaagcactgaccacctacgccgtggtactgggcgtggcgccggaagatcgcgagcacttcgcggccgtgacccacgagcacttccagcagatcttcagcaaggctgacgtgaccgctgacgacgtgcacaacaacaccattgctgtactgaaaagcgatgcccgtctggcgaaatacgctacccaggcttaagctcgtgcagcccgcgcctgcttaaggcgcgggttttatttttgggcccgcctcccctttgggtctctcttatttccgacttaagttgcccctatgctcaaacgctttgcctggatggcactctttgcctgcgccccgctgtacgcggccccgcatcttgatgatcaacgtttgcagcaattggccaacgatccgttctggctgtccctcggccattatgaagccggcaaaatcagtggctggcgcagctatgtcagcgacaagaaattcttcctcgcacccgatggcgcccaccacccggacgccgagctcaaggccaccgttgacgcgctctacgcgcccgccagcctgggtcaaaagcacgcccaatgcgtttaccccgcacggacccgctggctcaaggatcagttgcacctcactgacctgcctgccgtggactgcaccgaattcaagcaatggttcaaggacgtcgccccgcacagcgcagtgatgatcttcccggcggcctacctcaacagcccgtcgtcgatgtttggccacaccctgctgcgcatcgaccaggccgacgtgcaaagcaacaacaccgccctgctcagctatgcgatcaacttcggcgcctatatcgaaggctccgacaacagcattctctacgcctggaaaggcctgatgggcggctaccctggcctgttcgccctggtgccctatcaggaaaaactctccgaataccgtagccttgagaaccgcgacctttgggaataccgcctcaacctcacccaggtggagaccgagcgcatggtcgagcacgtgtgggaactcaagcagatccagttcgactacttcttcttcgacgaaaactgctcctatcgcctgctggaactgctgcaagtggcgcgtcccggcctgcgcctgaccgaacagtttccactgaccgccatcccgaccgacacagtcaaggccgtcaaggatgcgggcctggtggaaaggatcgactaccgcccgtcccgcgaacgcgagctgttggagcgcgccaagccgctggacagcgacgaacagcaatgggtgttgaaggtcagcgatgaccagaagcagctgcaggagcctgcgttcaaggccatcgcgaaagaccgccaagccctgatcatcgacgccgcctaccgcctcggccgctaccgcgccaatggtctggagcgcgacaccgcgcgctcccagcgcagcttcgaactgctgcgcgcgatcaaccagaaccccgcgcccgacctcaagatcaccccgcccggcctgccggaaaacggccacgaatcgcgcacctggcaagccggcatcggcacccgcggcgacaaggccttcggtgaatacggcctgcgcatggcctaccacgacctcaacgacaacgccgaaggtttccccctcggcgcacagatcgaaatcctgcagatgaaactgcgccagtacgaaggcaaccactggcaactgcagcaactggacctggccaccatccgctccctgaccccacgcaacgccctgttgcagccgtggtcctggcaagtcactgggggccttgaacgcgtgcccggcaaacacgacgacgaaaccctggtcgcccacgtcaacggcggcgccggcggtacctggcagttgagcgacgacatgctcggcttcgccctcggcaccgtgcgcgtggagcacaacaacgacttcagcgaagccatctccccggcagccgggttcaacaccggcgtgctgtggaagaacccactggggaacctgagcctggaagccaagggcgacttcttcaccaatggcgaagtgcgccgcagcatcagcctgaaccaacagtgggaattgtcgcgcaacctcggcctgcgtttgagcgcccaacgcgagtacagccacctgtcgacgccagtgaatgaagtgatgcttgaagtgaagtggtatcactactaacccacgcccagtgaaccagaatgtgggagggggcttgcccccgatagcagtgcatcagtcacgtatccatcgactgacacgccgtcatcggaggcaagcctcctcccacattgggtccgcgtctattcagttccctctaaaaggagccccaccaacatggccgttaactgcaccagcctcgaagaagtccgcacccacatcgaccgcctcgaccagcagatcgtcaccctgctggccgagcgtggcgcctacgtctcccaggccgcgcgcttcaagaaagacacggacagcgtcaaggccccacaacgggtcgaacaagtcatcgccaaggtgcgggagatatcccaggccgtgggtgccaatcccgaggtcacggaacaggtgtatcgcgcgatgattgcggcgtttatccagcaggaattggcgcagcatgctgcgctcacggaaactcgctaagaattacccaaattattcgcctacacagcaaacgcgcaagccatcctcaagcccctgattactaagaaggaaatcttgcggttttttttagcttttttgagtcatcgaaaacttgctccgacgaagcctcgctttatggggatttgtgtctagtctcgggtagcagtcaaattgccaccacgtctatacacggatctgaataggtaagaggcttactatggaatttttcgaaaagctcaccagtctggccgccaaggttcggttgcaaggcccggccattcaaacagaagaagcgaccaaaaatgcttttgtaatgccgtttatcaacacagtgctgggttatgacgtgtttgatccgcaagaagtgacgcctgagtttgtctgcgatgtcgggacgaagaaaggtgaaaaaatcgactacgccatcatgaaagacggcgaagttcagatactcattgaatgcaaaaaaatcggcgagtcactgaacatcaatcatgcctcgcagctatttcggtattttcatgtcaccagcgcaagaatctcaattctcaccaacggtcaggtctatcggttttttactgatctggacgcacctaacaagatggacgaaaagccatttctagagctggacctgctggacattgatgagtattccgtaccggagttgataaagctgacaaagtcagccttcgacgtcgattcaatcattaacgctgcgggagagctgaaatatgtcagccagctcaagaagctgattggcgctcaagtcagcaagccggaagacgacttcgtaaaattcttcgcctcccgcgtttacgaaggcgtgatcacgcagaaagtccgtgagcagtttttcgaactgacacgaaaagccttggctcagtttctgaatgaccaaatcaatgatcgactcaagtcagccatgagcggcgtaattcaaccaacgatagcttcattgactgtcacgaacagcgcgaatacggatcttcaggaacgagacgaatcggaagacaagatcctgacgacgcttgaggaactggagggttatcacatcgtccgcgctgtcgtacgctccgttgtcgatgccaaacgaatcgttcaacgcgatacccagagctattttgggatattactggacgacaacaatcgcaagcctatctgccgtcttcacttcaatcgcagccaaaaataccttgggatattcgacgaggaaaaaaatgaaacccggcacgccatttcatccattgatgagatttacgaatacgcggatcaactgaaaaaaacagtgggttattacgactgaaagccgcaccggaatattttcagccgtcgataaccctgtggtgagcgggcttgccccgctcaccacagaagcaaattcacctcttaagttgcagatgtcatcgcctgggtcaggtcatccactacggctttgcccatctcacacagatagtgcgcggcccaggcgtattgctcgccacgtacatccatcgcagcttccatggcgagtttcttggaataaaaaagcaaagtggaggcgtgctccagcgcttcctcaatgggcatgccggaattgacacgaaacagcggtttttcgttttcgccgtagtcgccgaaagtgacgacgccgagtgtggtgattgcggacaagggtggatcagggacgactttgctcatgatgattgctctcttatgaagtcgagccaccagatcacatcgctaaacatgaagagggtggcagctgtgtgcaggttagcgatccgggtctgagagcaccccgggtagactcaaaggtctcccgcacacagccgccataaaacgctaaaagctgacagatgccagctaatactattgggagcggtgccactcttgaggctcggatcgctaaacccggccgctgatatgcagcgacccaaagaggctaatgatccaaacggtacgtcacaataggccagagattctctaggaaacgtcctgcaatttaaagggaatcgtcattgatggccctttagcccaacacctttctcaccatcctttcacaccgccccaacaaacccctgactagacttcccctatcagccgtgaaacggccagggagtacgccatgtggcggtctgcggtaatgctgtgtgcagtggtgttgttggcgggttgccagtcgacccatcaggagttgttggccaagggttacccaccggcgtttgccgatggttttgatgacggttgcagcagcggtcgccaggcggccggggtgatcagcggggagtttcgcaagaacgtgccgcgttatctcaaggaccgtgaatacgccgagggctgggaggatggttttcgccagtgcaaggccatgcgcgagaacgaagacctgcgcgactacaaggacaatcactgggacgaccgcgaacgcgcctggcagcatgagaaagaccgcgacgccgccagggcctatcgttcgcagtaggtagcggacgcaaagcgtccagggcagcattcccacgcagagcatgggaacgattgcgcggcgatcatggcccaaactccattgagggagaacgtcatgagccgagcttttgtaaacgaggataacgccgccgaccaggccgaccagccggtagagcgccaggtcagtgagcagcccaaccgccttaccgcgcaagggctggcgcagttgcaggccaaggttgcgcagttgcagcacgaatacggcctggagtccgccaaagacgacaagcagcgccaggcggatcttgagcgggatttgcgctacttcaaccagcgggtgcagagcgcccaagtggtggcgcccgcaacgtccaccgacaaggtgcagatcggcagctgggtaaccttcgccaatgagcaggacgaacagcaacgcattcagttggtcggtgaagaccaggccgacgccggcgccggcttgatcaactgggggtcgcccctgggccgcgccttgctgggcgcccaggtcggcgacgaggtgttgtggcaacgccccgtcggcgatcagttgatcgaagtgctgcggatcgagcccgaggcttagacgatgccttgggccagcatggcgtcggcaactttgacgaagcccgcgatgttcgcgcctttgacgtagttgatgcggccgttttcttcgccgtagtgcacgcaggcatggtggatcgactgcatgatgttgtgcagcttgctgtccacttcaccggcgctccacagcaggcgcatggcgttctgtgacatttccaggccactcacggccacgccaccggcattggacgccttgcccggggcgaacaggatgccggcctcgataaagatatccacagcctccaaggtggtcggcatattggcgccttcggccacgcagaggcagccgttgcgcagtagagtacgggcggcctcggcgtcgagttcgttctgggtcgcacagggcagtgcgatatcgcaggccagttcccaaggggttttaccggcgcggaattccaggccgtaacgtgacgccagttcgctgatgcgcccgcgctgcacgtttttcagctccagcagggccgaccattgttcctcggtcaagccgctctcggcgtacagggtgccttcggaatcggacagggaaatcaccttgccgcccaggtccatcaccttgcgcgccgcgtattgcgccacgttgccggaaccggacaccgccacgcgcttgccttcaacccgctggttgttgcgcttgagcatttcttcggcgaaatacacgcagccaaaaccggtggcttccgggcggatcaggctgccgccgtaggtcatgcccttgccggtcagcaccgaggtaaattggttgctcaggcgcttgtactggccgaacaggaagccgatctcacgggcgcccacgccgatatcgccggccggcacgtccacatctgcaccgatatggcgatacagctcgctcatgaaggcctggcagaagcgcatgacttcggcgtcgctcttaccttttggatcaaagtccgagccgcctttgccgccgcccatgggcagcgaagtcagggagttcttgaaggtctgctcaaaggcgaggaatttcagcacgcccaggttgaccgacgggtggaagcgcaggccgcctttgtacgggccgatggcgctgttcatctggatacggaaaccgcgattgacctggaccttgccgtgatcatccacccacgacacccggaaggtaatcgcgcgttccggctcgcagatgcgctccaggatgcccgaggtcaggtagtgggggttggcttcaagaaacggccacaggctgcgtaggacctcttctacagcctggtggaattccggctggtcagggtcgcgtttcttgagacgggcaaggaaggattcgacggattcgatcatgaaaagtctcggcaaattgattgtttttaaatgagattgggccggactttaacaattcatgtcgcaccgcgacagggcaaaatgtcgcctttgtgaatttaaatggtgcattagatgtaaatcacaggccatttctgcccttaaacagggatttcagctcaagcgacgcaccaatagtcacacagctatcgggggcaagccccctcccacatttgaaagccaaaaaaacggagcccgaaggctccgctctttcaaaccaccagcccggatcaggccagttttttgtgccgtacacggtgcggttgagcagctgcttcgcccaggcgcttcttacggtccgcttcgtactcggtgtagttaccttcgaagaacaccgcttgcgagtcgtcttcgtacgccaggatgtgggtcgcgacgcggtcaaggaaccaccgatcgtgagagatcacaatggcggcgcccgggaagtccagcagggcttcttccagagaacgcagggtttcaacgtcgaggtcgttggacggttcgtcgagcagcaggacgttgccgccctctttcagggtcagggccaggtgcaagcgaccgcgctcaccaccggacaggtccttgacgaacttctgctggtcgccgcccttgaagttgaagcgaccgacataggtacgcgacgggatttcatagttgccgatgcggatctggtcggaaccgtcagaaatctgctggaacacggtcttgctgccgtcgaggtcttcacggctctggtccacgcaggccagctgcacggtttcgccgacttcgatggtgcccgaatccggagtttccttgcccatcagcatgcggaacagcgtggatttacccgcaccgttaccgccgattacgccgacgatcgcgccttttggcatggagaacgacatgttgtcgatcagcacgcggtcgccatagcctttggaaacgttcttgaactcgatgaccttgtcacccaggcgcggaccggccgggatgtagatttcgttggtttccgaacgcttctggaattcctgcgattgcatttcttcaaagcgttgcagacgggccttggacttggactggcgggccttggcgcctttgcgcacccactccagttcttccttcatggccttttcgtgggccgattgctgcttggattcggcggccagacggtcggacttggcttccagccaaccggagtagttgccctcgtaagggataccggcgccacggtcgagttcgaggatccagccggcgacgttgtccaggaagtagcggtcgtgcgtgatcgcaaccacggtgcccgggaaatcgtgaaggaagtgttccagccaggcgacggaatcggcgtccaagtggttggtcggttcgtcgagcagcagcatgtcgggggccgacaacagcaggcggcacagggccacgcggcgcttctcaccaccggacaggtgttcgaccttggcgtcccacgccggcaggcgcagcgcgtcggcggcgacttccagctggcgctccaggttatgaccgtcgccggcctgcaggatcgcttcgagcttggcctgttcggcggccagtttgtcgaagtcggcgtccggttcggcgtaggcggcgtagacctcgtccaggcgtgcctgggcgttcttgattacgctgacggcctcttcgaccacttcacgcacggtcttggtcgggtccaggatcggctcttgcggcaggtagccgatattcagatctggcatcgggcgggcttcgccttcgaactcggtgtcgacgccggccatgattttcagcagcgtggatttacccgaaccgttgaggccgagtacgccgatcttggcgcctgggaaaaaggacagcgaaatgtttttcaggatttcccgcttcggggggacaactttgcccagccgatgcatggtgaagacgtattgagccatggagaacctagcgtcagtgactgatgaattaagcggacgaagcccgtgccaggccatgcgcggcgcgggccgttgactatcatcaatgcctgcgtgcggtataaagcctgaatatctggggctggaacgcccccgcgtaaccggcaaagctacctgaatgcgcttggtcagtccagccaggcaagggctggcactttgccacaagtcaaggcatgctagccgccctccgggcgtccggcttatagtgcacgtcgcgcgccagtccagccaaaccgcaggatcacagcttgtccaaagtcacgccgccaactcccctgcgcgccgctcatatagcgccgggagcgcccctgcacggcaccctcaaaggcgcattggcgacgctcgtcctcatgctgctcgcattattgttctggcaactgctggaccaactgcagcaaaaccagaagaaccagcagcaatacaccatcgactacagcgccgacctggctgaacagatcagcctgaacatggccctcagcgcaaagatcgccctgaacctgctgccgatggtcgagccgccgcgtgacagcgaacagcaacaggccttgatgcgtaccttgcaacgttcgttgccggaactgcgcagcatcgccctgcttgcccccagcggcgcaatgatcagtgacagcgccactgatagccaggacagcgcctggctcgaagaactggtgcaacgcagccacggccagtcttattacctgagcaacagcaatgacggcaccctcatctatctcttgttgcaccagcccagtggcggctcacggatgtattgggcgctgcgcctggcgcccaactacctgaccaacctcacccgccaggacggccagggccagcgcccgatgtgggccatcgagaaccgccttaaccatcgcgtggtcagccgtgacagcggcatgccggcgcagtggacctcggcgctgaccccggacgaattgaacaaaagcgtgctggtcacccccctgagcaaaagcgactggcaattgcgcgggctgttcgaccgcagcgccgtgctggagcaactgctgccggccttcatcggtaaatgcctgctgggcctggcgttctcgttgatcccggtgatcgtgctgctcaacatgcgccgccgtcagcgccaggtgcatgaggggcggcggcgctaccaggatattttcgaaggcaccggcgtggccctctgcgtgctggacctgtcggggctgaatgcgttcttcgacaagactcggctggaaacccgcgagcaactgcacgcctggctgcaggacaaccctggcgagcgccagcaactgctcaaggaactgcgcgtcaccgaggtcaaccaggtggcggtcagcctgctgaatgtgggttcctgcgagcaggcctgggagcgcctgatcgatgactgcccacgcaacgctacgtccatcggttaccagattctcgaagccgtcctgacccaacaaagccagttggagctggaaatccagctcaaggacgtggtcggcaacgagcaatacctgtggctagtgatgcgcctgcccgagcagcaggacgatttcaaggcggtgatcctcagcatcagcgatatcaccagccgcaagctgatcgaactgtcgctggtggaacgcgagagtttctggtcggacgtggtgcgcaccgtgcccgaccacctgtatgtgcaggatgtgatcagccagcgcatgattttcagcaaccaccatctgggccacaccctcggctataacaaggccgaactgcagcaaatgggcgagtacttctgggaaatcctgctgcaccccgaagacgccgagcattaccacgacttgcgccagcaacagcgccaggtcggctacaccacccaactgcaatgccagctgcgtttccgtcaccgcaataacgaatggcggcgcttcgatattcgcgaacaagcgctggcgcgggacaagaccgcgcagatcacccgtatcatcggcgtggccaaggacattaccgaccagatcgaagccagcgaatccctgcgcgacagcgaacagcgctaccgcatgctggccgaaagcatcagcgacgtgatctgctccaccgacagccagttggccctcaattacgtcagcccgtcagtcaacgccgtgctcggctatgacgtggattgggtgttcaagaacggctggcagtcgatcatcgccaacccgcagcaactggccggcatttatagcctggtggaacagatcagccgcgcgctgggcgatcccgacgcgctgaacaggctgcgtgatgagatccagacccagctgttcctgttcgactgcctgcgtgccgacggtcgcaaggtgccgatcgaactgcgcctggtgctggtgtgggacgagcacggcgccttcgagggcatcctcggggtgggccgcgatatcagccagcaacgccgcgccgagaaagacctgcgcatggcggccacggtcttcgagcactcaacctcagcgatcctgatcaccgaccccgccggctatatcgtgcaggccaacgaggcgttcagccgggtcagcggctatgcggtcagcgatgtgctcgaccagttgccgaacatgctcaccgtcgacgaacaacaggaagcccacctgcgctatgtgctcaagcagttgcaccagcacagcacctgggaaggcgaagtgtggctaaagcgtcgcaatggcgagcattacccggcgtgggtcggcattactgccgtgttcgacgatgaaggtgacctggccagctatgtatgctttttcagtgacatcagcgagcgcaaggccagcgaacagcgcatccaccgcctggcctactacgacgccctgacccacctgcccaaccgcacgctgttccaggaccgcctgcacaccgcgctgcagtcggcggaacgacagaagtcttgggtggtgttgatgttcctcgacctcgaccgcttcaagccgatcaacgactccctgggccacgccgccggcgaccgcatgctcaaggaaatggccacgcgcctgctgggctgcgtcgccgaagacgacaccgtggcgcgcataggcggcgatgagttcaccttgctcctgcaaccacgggtcaaccgtgacatggcactcaaccgcgcgattcatgtggccgagcagatcctcgccagcctggtgaaacccttcgtgctggagggtcgtgagttcttcgtgaccgccagtatcggtatcgccctgagcccgcaggacggcaacgaactgagccagttgatgaaaaacgctgacacggcgatgtatcacgccaaggaacgcggcaagaacaacttccagttctaccaggccgacatgaacgccagcgccctggaacgcttggagctggaaagcgatttgcgccatgcgctggaccagaacgaattcgtactctattaccaaccgcagttcagcggcgacggcaaacgcctgaccggcgccgaagccctgctgcgctggcgtcatccgcgccgcggcctggtgccgccgggagacttcatcccggtgctggaagagttgggcctggtggtggatgtgggcgactgggtgatcagtgaggcctgtcgtcagctcaagacctggcaccagaacaaggtgcgggtgccgaaagtctcggtgaacatctcggctcggcaattctccgacggccagttgggtacgcgcatcgccaccatcctcaaggacaccggcctaccgccggcgtgcctggagttggagttgaccgaaagtatcctgatgcgtgaggtcaacgaggccatgcagatcctcgacagcttgaaaaacctgggcctgagcattgcggtcgacgacttcggcaccggttactcgtcgctcaactacctcaagcagttccccatcgacgtgctgaagatcgaccgtaccttcgtcgacggcctgccttctggcgaacaggacgcgcagatcgcccgcgccattatcgccatggcccacagcctgaacctggcggtaatcgccgagggtgtggaaacccatgagcagctggatttcctgcgtgagcatggctgtgatgaagtgcaggggtatctgtttggacggccgatgccggcgaaccggttcgaggcgcagttcagcaatgatgcgctgttcatgttcgactgaaattctgcggtgaaaccactggcctcatcgggggcaagccccctcccacattatgatctgcgaacacattcaactgtgggagggggcttgcccccgatcaggcactcgcagccaccgcctatccccagatgagctccacttgtccgcgacatgatgtcctttcatatgccatctaaaacccattgggttagaatgccctccttttctgcccccgatccttgaggaccgccatgttcagccgtgatttgactattgccaagtacgacgccgatctcttcgccgccatggagcaagaagccgtgcgccaggaagagcacattgagctgatcgcttcggaaaactacaccagccctgcggtgatggaggctcaaggctcggttctgaccaacaagtacgccgaaggctacccaggcaagcgctactacggtggttgtgagtacgtcgacgtggttgagcaactggccatcgaccgtgcaaaagaactgttcggcgccgactacgccaacgtccagccacacgccggttcccaagccaacagcgccgtgtacctggccctgctgcaaggcggcgacaccatcctgggcatgagcctggcccacggcggtcacctgacccacggcgccagcgtttcctcctccggcaagctgtacaacgccgttcaatacggtatcgatgccaacggcctgatcgactacgacgaagtcgagcgcctggcggttgaacacaagccaaaaatgatcgtggccggtttctctgcctactcgcagatcctggacttcccacgcttccgcgctattgctgacaaagtcggtgcctatctttttgttgatatggcccacgttgccggtctggtcgccgctggcgtctacccgaacccggtgcctttcgctgacgtcgtgaccactaccacccacaagaccctgcgcggtccacgtggcggcctgatcctggctcgcgccaacgccgacatcgagaagaagctgaactccgctgtcttcccaggcgcccagggtggcccgctggagcacgtgatcgccgccaaagcgatctgcttcaaggaagcgctgcagcctgagttcaagacctaccagcaacaagtggtcaagaacgcccaggccatggccagcgtgttcatcgagcgcggctttgacgtagtgtctggcggtaccgagaaccacctgttcctgctgtcgctgatcaagcaggacatttctggtaaagatgctgacgctgccctgggcaaagccttcatcaccgtgaacaagaactccgtgccgaacgacccacgttcgccgttcgtcacctccggcctgcgcttcggcaccccggctgtgaccactcgcggcttcaaggaagcagagtgcaaggaactggctggctggatctgcgacatcctggcagacctgaacaacgaagccgtgatcgacgcggtacgtgagaaggtcaaggccatctgcaagaagctgccggtgtacggcgcttgattgcagttgcttgaataagaagcccggctgaagagccgggcttttttatgccaattccagtttgaaatacagttaattgtgggagggggcttgcccccgatagcagtgtgtcagtcacagagttatctactgacacaccctcatcgggggcaagccccctcccacatttgattgtgtttcaagtcagggttggtagaccttggcaaaaccttcgcgaattttgtcttcgggcaactcatcggcaatgaacacgatcacactctctcgcacctcgccttcggcccattcggtatcccaatcgaaaccgtagagtttcagcacgccctgaaacaccatgcgccggtcttccccggcaatgttcagcacgcccttgtagcgcagcagttgcttgccgtggtcttccagcagttcgttcatgaactcactgagtcggtcgatatccagcggctggtcggtgcgcagcaccagactggagatacggtcgatggacggcgcggcgcgcaccgggcgcaggctcatgcccgcgttgaggttgaagccgcgcacatcgagcagttcggctaaatcaatcttgccgtgctcgaccacgcgaatcggcgcacggcggttgatgcgggtcaggcgttcgctgagtgcgtcgaaggtggcgtcgtccaccaggtcgcgcttgctcaccagcaggcggtcggcaaagccgatctgggcctgggcgatggtctgggtcaggtggtgctcggcgtgggccgcgtccaccagggtgatgatgccgtcgaggatgtagcgctcacgcaattcctcgtcgatgaaaaaggtctgggccaccggcgccgggtcggccaggccggtgcactcgatcaccagacggtcgaaggcgatctcgccgctgtccaggcgctcgagcagcaggtacagggctttggtcaggtcggtgtggatggtgcagcacacgcagccgttggacagggtcatgacttgcaccggctctgcgcccaacagctgggtgtcgataccggcgtcgctgaattcgttttcgatcacggcgattttcaggccgtgctcggctctgagcaggtggcgcagcaaggtggtcttgccggcgccgaggaagccgctgaggacggtgaccgggatgggagaggacaaaatattctccttgaaggaacacagaaacaaatgtgggagggggcttgccccctcccacaggggagttgcgttaactcaacagcacttgggcccacccttgccgccgtaacgggcttcctggcgttcccggaagaacgccttgtagtccatcaccggcttgtccgggtgtttggtttgcatatgctcgacgtaggtgtcgtagtcgggcatgccgaccatcaggcgcgcggcctgaccgaggtatttaccgaggcgactgatgtcattgaacatggttgcaaccctcgattacgcgtccggtacggcctggaacggggcttctttatccgtacgttctttgttgccccaggcggcgacgccaaccttgagcgcatagaacaggatgctgaacaccacgaacaggaacagcgccgtcagcgttgcgttggtgtaggcgttgtagatcacgtgctgcatctggtcgatgctcttggccggggccaggatctggccgttggccaatgcatcgctgtatttcttcgccagcgacaggaagccgatcgccgggttggcgtcgaacagcttgatgaagcccgcggtggtggtgcagatcagcagccagacggccggcagcatggtcacccagatgtagcgttggcgcttcattttgatcagcacaacggtagccagcatcagcgcgatacccgccagcatctggttggagataccgaacagcggccacaaggtgttgatgccgcccagtgggtcgatcacgccctggtacagcaggtaaccccacatcgccacgcagcctgccgttgcaatgaggttggcggtccacgactcggtgcgtttcagcgccggcacgaaagagcccagcaggtcctgcagcatgaaacgaccggcacgggtgcccgcatccaccgccgtcaggatgaacagcgcttcaaacaggatcgcaaagtggtaccagaacgccatggtgttttcacccggaagtacgctgtgcaggatctgtgcgataccgaccgccagggtcggtgcaccgccggcacgggccaggatggtggtctcaccgatgtcacgggccacggcttgcagcgcctcaggcgtgatcgcaaaaccccagctgctgacggtttgcgccacggcaaccacatcaccaccgaccacggcggccgggctgttcatggcgaaatacacgcccggttcgatcaccgaagcggcaaccatcgccatgatggccacgaacgactccatcaacatgccgccgtaaccgatataacgggcgttggtttcgttatccagcagcttgggcgtggtgcccgaagagatcagcgcgtggaaacccgagaccgcgccacaggcgatggtaatgaacaggaacgggaacaggccgcccttccacaccgggccggtgccgtcgatgaactgggtcagggccggcattttcagctcgggcatggtgaccaggatgccgatcgccagggcgatgatggtgccgattttcaggaaagtggagaggtagtcacgcggtgccaggatcagccacaccggcaggacggcggcgacgaaaccgtagccgatcagcatccaggtaatttgaatgccggtgaaggtgaacgctttggcccagaccggatcagcggcaatctgcccgcccagccagatcgaacccagcagcaacagcacgccgatgatcgaaatttcaccgatgcggcccgggcggatgtagcgcatgtagatgcccatgaacatcgcgatcgggatggtcgccatcaccgtgaagatgccccatgggctctcggccagggccttgaccacgatcagcgccagcaccgcgaggatgatgatcatgatcaggaagcagccgaacagcgcgatggtccccgggatgcggcccatctcttcgcgaaccatgtcccccagggaacggccattgcgacgggtggacaggaacaggaccatgaagtcctgcaccgcaccggccagcaccacgccggcaatcagccagagcgtgccgggcagataacccatttgcgccgccagtaccgggccgaccagcgggcctgcaccggcaatcgccgcaaagtggtgaccgaacaggatgtgtttgttggtcggcacatagtccagaccatcgttgttgagcactgcgggggtggcccgccgtggatcgagctgcatcacattattagcgatgaacagactgtagtagcggtacgcaaccagatagatggccacagcagcgaccacaatccacaaggcgttgatcgcctcgccgcggcgcaaggccactacgcccagggcgcacgctcctacgattgccagcaccagccagggtaggtggcgtagcaggctattattatttttcatttttgtattccagccagggtggacagaaaggacagccatccggagtttagcgctactggacttaaaggccacccccctacgttggtctagagccttctgcggacaaaaaaagcagaaaacccgggccaataatgacgcacggctacaatccccctatccccggagggtttcaccatgaccgagcaaccgtctgaccgccgtcgtttccgccgcatcgcctttgatgccaagaccgaaattcggcaaaacggccgcgaatggccagtgcaattggtggatttgtcgttaaagggcctgctggtgcaacggccggaagactggaagggcaacaaggcgctgccgttcgacgtcgacatccgcctggatcccaaggcgcatataaagatgcaagtgcgactgacccatgaggatcctgggcaactgggttttgtgtgtcagcacatcgacctggactcgatcagccacttgcggcggctgatcgagttgaacctgggtgacgaggatgagctgcaccgagagttggccgccttgctggaagtgtgacgactcagggaaatgccgtacgcgccgggaagtcgctttccgactcccagaagccggctttctgagtcgacgcagcctgccagaggccatcggcaaaacggtaggtggtgtaacgggtggcgaagtcttcgtccccatcaccgtccatgaaggacgacacttgcagcaattcatccgccccacccgcggttggcgtcgccgcctgccaggcggccttgcctgtctgggccagggtcagtggcttgatcttgccgtcggtgcctttgtagtccatcggtttgagttgttgcttggcgggcattaacaactgcgtggccgggccgctatagctacccatcggcgcggtctggtcgatgaccaggaaatacaccgtctccggcaagcccttgagcggggctttcttgacctcggccaacgggtaaccgaggtcttcatgggcgatcacgtcgccggaggccgacactaaccggacctgggcttccaacaacggtttttccaccaggtcgccgggctcgtcgaacgaatcttcgtccaacccgttgccccaactgtccttgtgcaactgagcgctgatgcgttggtcttcgagcacctgtagaacgctgccgtcatccgttgccagcttttgcgccagacgatatccggcgggcaactcggcccacgccaaagcgggcaacccggccaaggcgacaaacagggcgactgcgccccagcatttcgatggttgcatggcattcatccctgatttattcgaacagtgcatccagcgcctgctccaggcgcgtgaccccaataatttttatgcctggcggcgactctttcggcgcattgcccttgggcacgattgcgcgtttgaagccatgcttggccgcttctttcaaccgttcctgaccactcggtaccgggcgcacttcgcccgacaggccgacctcgccaaacaccagcaggtcgtgaggcagcggtttattgcgcaagctcgacatgaccgccgccatcaacgccaggtcggacgccgtctccagcaccttgaccccgcccaccacgttgaggaacacatcctggtcatgggtcggaatgccgccatgccggtgcaataccgccagcaacattgccaaccggttctgatccaggcccagggtcacgcggcgcgggttggccaggtggctgtcatcgaccaacgcctgcacttccaccagcatcgggcgggtgccttcccacgttgccatcaccacactgcccgggacttcttcctgggcacgcgtcagaaagatcgccgacggattggagacctctttcagtccccggtcggtcatggcgaacacgcccaattcgtttaccgccccgaagcggttcttcaccgcccgcagcaaacgcaggcggccatccgattcaccttcgaaatacagcacggtgtcgaccatatgctccagcacccgaggcccggccagcgcgccttctttggtgacgtggccgaccaggaagatcgccgtgccgctctgcttggcataccgcaccagcagcgccgcgctctcgcgcacctgggacacgccgcccggcgccgattgcaactgctcggtgaaaatggtctggatcgagtcgatcaccatgaccttgggtttttcaatacgggccgtggcaatgatgctttcgatgcaggtttcggtcatgacccgcagctgatcctggggcaaccccaggcggcgggcgcgcatggccacttgttgctgggattcctcgccggtgacatacagcgccggcatgcggctggcgatgctgcacagggtttgcagcaaaatcgtcgatttgccgatgcccgggtcaccgccgatcagcaccaccgagccgtccaccaggccgccgcccagcacgcggtccaactcgccggatgccgtggaaaatcgcgggatttcttccacgctgacttcagccagggtcttgatctgcgcctgctgcccggtccagccggcgcgaccggtgggggccgccgcaccgccactctcaatcatggtttcagtcagggtgttccacgcaccacactcggagcactggccggcccacttgggaaaggtcgcgccgcactccgtgcagccgtacatgcgcttggcctttgccatttgagaacctccaaccgaaaaaccgcgatgatagctcagcgcgacgccggggtccggatttcaccactggccaagcgtgaagcggtgttaccgaccgggtcttcggcattgagatcggcacctttggccttgagttcatccagcagctcgacacgcttgaacagcccggcgtacatggcggcggtctgtccggcaccgttgcgctggtcggggttgcagtcggtggccaacaggcgctgggcgattttcagctcgcctttgaagatcgcgcccatcagcgcggtgttgccgcgtttgtcctgcacgcaggcgtcggcaccggcgttgagcaagcgctccacgaacggcccctggccgtggtaggcggcgaggatcagcgcggtgtagcccttgtcgtcctgggtgttgaggctataaccggcgtcgatgaaggtgttgagcatgtccaggtcaccacggcgggcggcgtcgaagtagtagtcctgcaactgggccttgagcgctaccgggtcgggagtctcggcatgggcgacaaaggccagcatggtcatcagcaagccgatagaaattcgcatggtttttctcctgccaggggtcgacgcccgtatcggggcgtcgaccgtaaccaacggatcagtcggtcagtttttccgccagcgccttcacgcgcgccaggtcacccttggccaccttggccacgccggtgccgtattccgggtcggctttgtaaaggaacgacaggatgatgtgcttgctctcgtcatcggtggtcgccagcgagccaccgaagttttcgatcaagtcctgacgctctttcttgctgtaggagcggtacaagtcacctgcctgcttgaagttctgctcacgctggatcttcgcctgctgggtgctgcctgacagcgccgactggctgtagcgcgcggtttgcggttcttcccgtggcaacaggcggcttggctggtagttcacaccggtggtggtcttgccgaagttcatcgcgccgtcctggttgccgttgttgacggtcacccgtggcgcgttgatcggcagttgcagggcgttggcgcccaggcggtacatctgggtatcggcgtaggagaacacccggccttgcagcaggcgatcttccgacggctcgatgcccggcaccaggttggccggggccatggccacttgctcggtttcctggaagacgttggccgggttgcggttcagcaccatctgtccgaccttgcgctcgggcacattcggccagatcttggtggcgtccagcgggtcgaaatcgaacttggccaggtcttcaggcttgagcacctgcacgtacaggtcccacttggggaagtcgcccttgttgatgtgggtgaccaggtcgttggtcatgtggctgtagtcgcggccctgcacttcgatgacctgcttgggatcgaggttcttgatgccttgcaggctcttccagtggaacttgacgtagtgcacttcacccttggcgttgatcagcttgtaggcgtgcacgccgttgccgtccatctcccggtaactggccggagtgccagagtcggagtacagctcggtcagcgtacgggtggcttcgggcacgtgggagaagaagtcgaagcgacgcgagtcgtcatccaggttggtacgcgggtccggcttgaacgcgtggaccatgtccgggaacttgatggcatcgcggatgaagaacgtcgggaagttattgcctaccaaatcccaattgccttcggccgtatagaacttggtggcgaaaccgcgtgggtcacgcagggtttccggggagtggttgccgtggaccacggcggagaagcgcacgaacaccggcgtcgcctcgccggccgcaaagaccttggccttggtcaggtcgctaaggccgtcagtgacggtgaaggtgccatgagcgccggtgccacgcgcgtgtacgacgcgctcggggatgcgctcgcgatcgaaacgctgcaatttctgaataagctgcacgtcctggagcagtaccgggccattggcgccggcggtttgcgagttctggttgtcgccgacggcggcaccgttgtcgcgggtcaggttggcggcgtgtaccgacagggagagcaggctggcggtcaccagtaccagcgcggatcgcgctgtaacgggcccacggctcattgggttgttcatcgaggtttcctctggtttttttagtgcacattcagttgtgcttgccagaggctagtgacccgcgagtcagaagataaatagaaaagccgtaccaacccgatagataaaataatctggtaagtcgctgatttggcgagtatttcgcgcgcgattgatggcactttgcaaactatttgcgttttaatgtgtcgataaaagctaacagtgttaacggttgtttcaggcaagccctctacgactgacttacactgggtaccacccttctcatctgtaacaaggaataacctatgggcgtgatcagtgagttcaaggccttcgcggtcaaaggtaatgtggtcgacatggccgtcggtattatcatcggcgccgccttcggcaaaattgtttcctcgtttgtaggcgatgtggttatgccgcccattggtctgttgatcgggggcgttgacttcggtgacctggcgataacgctcaaggccgcccaaggcgatgtgcctgcggtggtcctggcatacggcaagttcatccagagcgtcatcgactttgtgatcgtcgcgtttgcgattttcatgggtgtgaaggcaatcaaccgcctcaagcgtgaagaggccgtggcaccaagcctgccgccgacgccgaccaaggaagaagtgttgctgggtgagatccgcgatctgctcaaggcacagaacgacaagccgctctaatcgagccggcacgaaaaaggcgcctggtgtgaggcgccttttttattaccagtagttttccaccgccacctggccaggtcgacggctcaagctcaggttcatatcgcgctgcttgaacaactggcgtgtgtcatcgaccatctgcgggttgccacagatcagcacgcgggaatgctccggggtcagttcgacgcccgccgcgcgttccaactcgccattttcgatcagcgtggtaatgcggccgttcaacgcaccggggtgttgttcgcgggtgacgatggggatgtaggtgaacttgtgcgcgtattcggccaggtactcgcgttcgcccaacgtgttgatcagcgcttggtaagccaactctttggcttcgcgtgcgctgtacaccaggatgatgcgttcgaatttctcccagacctcgaagtcctgcaggatcgacaaaaacggcgccaccccggtgccggtgcccagcatccaaagatctcggccgtcgacgaaacggttcaaggtcaggaaccccgtggcctggcgctccaccatcaaggtatcgcccacacgcagacggctcagttcgctggtgaactcaccgtccgggacgacaatcgagaagaagtccaggtgctcatcaaacggcgaggacaccagggaatacgcacgccataccgtgctgccatccgccttggtgacccccaggcgcacaaactggcccgcggtaaaacgaaagcccgggtcgcgggtggtgcgcaaggtaaacaggctgggggtcagcgattgcacgtcgagcaaggtctggcgggtaaatttctcagcactggccgtcatggggggctccgttctacaggtgccctagtgtcgctcaaagtcacgtgcggaaacacctacgataggtagtggcatcacgcaagcacacagtgatggcaaattaatttcaccttcgatcaattcgctattagctataaaaactacctcatatagccgctgttagtgggttgttacaggggcttcaaccccctaataagtcgcgggtttcaaacttgccacttgcttggctaactaccttcctgtggaaaaattcttaaaccttacagcgcaagaacgaaattttcctctcgccatgtagtacgtgtcctacactgattttcgtgcaacgttggggataaaggacgtaccccaagtcacggagatcccatggagatttacccatgcttaactggcgaaatacacgactccactcgctcgaaggtgaggacgaggtcaccagcgtattcgaaatgaccatcaacaaggcctacgaactcggtttccaatactgttccttcaagatgagctctcaactcaccaacggtcaaaacaaaccggtggaactgacgaactatccaattgaatggaaaaatctatacaaccaagcgcactacttcgatgtagaccccgtagtgaaacattgtagggagggcgtgttaccccttgtctggaaggaggaaacattcaaagacgtgcccagtctttggtctttggccgctaccttggaggtacacaaggcgttgactatcagcgtgcatgatttccggggggtcttcagcatgctgacgttgagccgtggcaagggtgacatcagcccggaagaattgtatgaaaaagcaggaatggcgctatggctctgccacgccatgcatgccgtgctggcgcagaagtttgccgaaaaacccagcgtcaaccctgcaagcaaattgacccctagggaaacggaagtccttatgtggtctggcatgggcaagaccgcagcagatatcgccgccatcctttgtttgtccgagcgtacgataggctttcatatgaacagtagcttcaagaaactgggcgtcaacaacaaaatcgccgccgtgcttcgcgccgctcgggccggcatcatttaaaacactccatgtaatccccttgaaaaaaacgtaacatttaccgcccattctgagtgctgagcagccccttccggggagtcgcccgtggttcactcagacggttcggcaaccgctgtcgaacacccatcgtttacccagagtctcccccgccatgcccctgctcgaaagcccctttgcccagctcgatctgatccgccagccagagcaacacaacgatccgctgcaagccttcgatgccgccgacgagtacctgctcagccatttggccgaacagcagccggccgcacacacccgggtgctggtgctcaatgacagcttcggcgcccttgccgccagccttcagggccgggtgcaggtcacctcaagtggcgactcgttcctggcggcacaaggcctggaaaaaaacctggtgcgcaacggcaaggcgtttgacgctgttccgttcatcccggccagccacctccccaccgggccgttcgaccgggtgctgatccgcgtacccaaaaccctcgcgctgctggaagaacaactgatccgcttgcaaggccaactggccccaggcgccgaagtgatcgccggggcaatgatcaagcatttgccacgggcggcgggcgagttgctggagcgttacattggcccgatgcacgcatcgctcgcggtaaaaaaagcacgcctgctgatcgccaccgcgcaagaccgccccgttgccgtctcgccctaccccacccgctacgccctcgacgcaccggctatcgagttgctgaaccacgccaacgtgttctgccgtgaaagcctggacatcggtacccgcgcgttcctgccccacctgccgaaaaacctgggcagcgcccgcgtggcggacctggggtgcggcaacggcgtactggcgattgccagcgccctgcacaaccccgaagcacactacaccttggtggacgagtcctacatggccgtgcagtcggcgctggagaactggcaagccgccctcggtgaacgtgatgtggtggtgcgtgccgccgacggcctggccgggcaagagccacaatccctggacgtggtgctgtgcaacccaccgttccaccagcagcaggtggtcggtgatttcctcgcctggcgcatgttccagcaggcacgggaagcactggtggtgggcggcgccctctatatagtcggcaaccgacatttgggttatcacaccaagctggcacgcctgttccggggtgtcgagcaagtcgccaccacgccgaagttcgtgatcctcaaggcgcgcaaataaaaaaaccctgcttctctcgcaaaaagcagggctggaaagccgggccgcaaagcccggatcgggatgtcagtgggtggtcaggccggccgcattcataaacatgcgcatcaggctggccacgacgaacagggccagcacactgccagtccagatcatcgccagccaccccaggcgccgccacaatggctgcttctcggcctgttcaatctcgtgcaacgaaggtttgccggacatggaacgaccctcctagtgataaccgtcttcgtgggtgaccttgccgcggaacacgtaatagctccagaaggtatagcccaggatgaacgggataatgaacagcgtacccaccagcatgaagccctggctttgcggcggcgcggcagcatcccaaattgagactgacggcgggatgatgttcggccacaggctgatgcccaaaccgctgtagcccaggaagatcagcaccagcgtcagcaggaatggcgtgtagtgtgcgttacgtgccaccgcgcggatcaacccgtacatggtcaccagcaccaggatcggcactggcaggaaccagaacaggtttggcagggtgaaccagcgcgaggcgatttccgggtgcgtcagcggcgtccagatactcacgatgccgatcaccgccagcaccacgaaggccaatggccgcgccaggttgtgcattttctcctgcaacgagccttcggtcttcatgatcagccaggtgcagccgagcaacgcataagccacgatcagcgccacgccgcagaacatcgtgaacggcgtgagccagtccagcgaaccgccggcaaactggcgattcaccactggaatgccatcgatgaacgcacccagcgccacgccctggaagaacgttgccgccagcgagccgccaatgaatgccttgtcccacaggtgacgcttgtggtccttggccttgaagcggaattcgaaggctacaccgcggaagatcagcccgatcagcatcaggatcagcggcaggtacagcgccgacagcaccaccgaataggccagcgggaacgcaccgaacaacgccgcgccgcccagtaccagccaggtttcgttaccgtcccagaccggggccacggtgttcatcatcacatcacgatcggtcttgcccgggataaacggaaacaggatgccgatacccaggtcgaaaccgtccatgaccacgtacatcatgatgccgaagatgatgatcacggcccagatcagcggaagatcaatacccatctcaatgccccttgtgctggatgtgggtgtggtcgtcatcgctgccatcatcggcggcggacaacggacgggccggcgtacgtttctggccagggccaccgtgggtgggctcgctgccttcgtgggtctgaggccctttgcgcaccaggcgcatcatataacccaggcccgcaccgaacagcgcgaagtacaccaccacgaacaacaccagggtgatggtcatctgcgccaggctatgcccggaggacgcgtccgccgtgcgcatcaagccatagaccacccacggctggcggccgatctcggtggtgaaccaacccgcaagaatcgcgatcaggccggacggccccatccacaacgccaggtacaggaacggcttggacgtgtacatcttgtcgccccggcgcagccagaggctgaataggccagtgaagatcatcaggaagcccaggccgaccatgacccggaacgaccagaatacgatggtcgagttggggcggtcttccggtggaaactccttgagcgccggcacctgtttgtccagggagtgggtgagaatcaggctgcccaggtaggggatttctaccgcgaacttggttttctcggccttcatgtcgggccagccgaacaggatcaacggcgtcggttcgttaccgatgttttcccagtggccttcaatcgcggcaattttcgccggttggtgcttcagggtgttgaggccatggaaatcaccgatcaccgcctggatgggcgcaacgatcagggccatccacattgccatcgagagcatcttgcggatcgccgggttgtccttgccgcgcagcaagtgccaggccgccgaggaaccgacaaagaacgcagtggccacgaaggctgccgtggccatgtgcgccaggcgatacgggaacgacgggttgaagaccacggcgaaccagtcggtcgggatcacccggccatcgatgatttcaaagccctggggcgtctgcatccagctgttggaggagaggatccagaacgtggaaatcagcgtacccacggccaccatcacggtggagaaaaagtgcaggttgcgcccgaccttgttccagccgaacagcatcacgccgaggaaaccggcttcgaggaagaaggccgtgagcacttcgtacgtaagcagcgggccggtgacggcgccggcgaagtccgagaagcggctccagttggtgccgaactggtaggccatgaccaaaccggacaccacgcccatgccgaagttgacggcgaagatcttcgaccagaagtggtagaggtcacggtaggtgtcgttgtgggtcttgagccacaagccttccagcaccgcgaggtaactggccaggccgatggtgatcgccgggaacaggatgtggaaagagatggtgaacgcaaattgaattcgggcgagatcgagcgcctccaaaccgaacatatgtcttcctctgtcaggtaataccggctgctggcgggagcctgcacccactgcccccacggatatggagcctggcgaatttcgattcgtttctttttttagccaaccacgtagggaatctggccctgaggccgccaggccgatgcccgggcgggcattgatctggatcaagcattgctgaaagagtagtcccattttcaagattgaactgtgtggtcttttgccgcgtgacagactgcctcagctcagttgttgcaactatctgttacaacttaatgataatctcggtgctccctccggccttgacctgaactccccgatgcctagtgaacccgcgttgctgttgcgtcaccaccgccctttcatcgcgttctggctggcgcgtatcttcaccgccagcggcttccagatgctcaccgtggccatcggctggaacctctaccaactgaccggcaatgtgctggatctggggttggtcggcctggtggagttcgtacctcgcgtgctgttcatgttgcacaccgggcacgtggccgaccgctatgagcggcgcaaggttgccgccatctgccagaccgtgcaggcgctgattgccctgagcctggccatcggcggcctgaccggcaacgtgacccgtgagatgatctttattctcgcctttctgctgggtgctgcgcgctcctttgaaatgccgaccacccaggcgttgctgccaagtattgtgcccagcgccttgttcccgcgagccgtggcctcatcgcagtcggcccagcaattggcgaccatcgtcgcgccggccctcggcggtttgctctatgcgttcggcagcgtgtgggtgtatggcccaacggtggtcctgtacctcattgcctgcgtgctgaccctcaacctgcccgcccgccagacgccgttgaacaaaggcaaggccaccctggattcgctgctggccggcatccgttttatccgcagccgcccggacatcctcggcgccatctccctcgacctgttcgctgtgctgctgggcggcgcgaccgcgttgctgccggtgttcgccaaggacatcctgctgaccggcgcctggggcctgggcctgctgcgctcggcgccggcggtgggcgcgttgttgatgtcattgtggctggcgcggttctcggtggaccgccatgtgggccgcgttatgttcactgcggtaggcgtgttcggcgtggcgaccatcgccttcggcctgtccacctccttctggttttccctggcggtgctggtggtgctgggggcggcggatatgatcagcatggtcatccgtgcgtcgtttgtgcagttggaaaccccggatgacatgcgcggccgcgtcagtgcggtcaatggcctgtttatcggcgcatccaaccagttgggtgagttcgaatccggcattaccgcccactggttcggcaccgtgcccgccgtggtcatgggcgggatcggtacgctggtggtgacgggcgtgtggatcaagctgttcccgaccctggcgaatcgggatcgcatgcacgtaccggtggaagagcctattcaaaaaaccagcgtataacccatgtgggagggggcttgcccccgatagcgccatgtcagtcacagcatcgttgactgacaccctccatcgggggcaagccccctcccacacttggataatcagtgctggctagaccgtgtcagagcaccttatcgagggtgatgggaaattcccgcacccgtttgccggtggcgtgataaatcgcgttcgccaccgccgccgcaacaccgacaatgccgatctcccccacgcccttggacccgagggcgttgacgatctcgtcatgttcctcgacaaacaccacgtcgatctcgccaatgtccgcgttcaccgggatatggtattcggccaggctgtggttcatgaagcgccccaactgatgatcggtctgggtttcttcatgcagggccatgccgatgccccacaccaccccgccaagaatctggctgcgggccatcttggggttgaccacgcgcccggcggcaatcgcactgaccacccggcggaccttgatggtgcccaggtcctcatccacctgcacctcgacgaagacggccgaatgggtggcggtgctgtagccctcgcgttttttgtcgggctcgctgtcgacctgcacttccaacgcgtcttcgccactgtccttgaccaactgcgccaacgacacactcacgtcaccggtgtgcaagtggccgtcttcaaagcgtacggattctgcctgcgtgaagaccgggtatgtctgccgggcaatggccagcagtttgccggtcaacgcttcgcaggcttgctgcaccgccgtccccaccgaggacacggtaaacgaaccgccctgcagtggcgcggtgggcagtgaggaatcgcccaacaaaaaggtcacgtcgtcgaccgccacgccactggcctgcgccgcaatctgggtcatcaccgtgtaagtgccggtgccaatatcggtggtggcgctgctgaccgtcagtttgccctgcgcgtcgatccgcgccttggcactggccttcatctgcatggcttcccacaccccgccggccatgccccagccgatcaactggcggccgtcgcgcatgctgcgcggttccgggttgcgctggctccagccgaaacgctcggcaccttcgcggtagcactcgcgcagggccttgcttgaccagggtttgtcttcgttctggttgcgctcggcgtagttgatcaatcgcagttgcaccgggtcgatccccagggcgcaggccagttcatccatggcgcactccaggccaatcaccccgagggcagcgccaggcgcacgcatgtccaggggcgtgaacacgtccaggggcaccaggttgtaggtcagttgcacgttgtcgcagtgatagagcatgccgctccactccaccacatgttcgctgaaatcctcgaagcgcgaggtctggccgatagcggtgtggcccagcgcgagcaaacgaccgtcggcggccgcgcccatttgcaaacgctgcagggtgcgcgggcggtagccgaaggtaaacatctgttggcgagtcagggtaacgcgtaccgagcgtttgagcgccagggacgccatcaccgccagcggcaattggtactgcgggcgcaaaccggagccaaacgcaccgccgacgaacgcggcaaagatgcgcacctggcttttatccaggccgaagactttttgcacataggcctggcagttctgcgggccctgggtcttgtcatggatatgcagggtgccgtccggctgatacagcacggtgctggcgtgcggctccatcgggttgtgatgttcgacgggcgtgctgtagtgcaggtccaggctgacggcggcgccgctccactcggcctggaagttgccgcgcggcttgggcggggtttgcggcgaggcataggcctgttcctgcatggccagcaggtcggtttcgaaggcttcggttgcgtactcgatctccaccagggagccggcatgccgcgccaattcgaggttgtcggcgatcaccaaggccaggggttggccgctgtacagcacacggtcgttgtacagcgggcggaacggcgagccgtcggccgcgtcgtcgtcctggaaagcgtcgtcgtagctggcgattcttggccggttgaggtgatcaattaccgccaccacccccggcagcgccaacgccctggaagcgtcgatacgcagcacccggcccttggcgacggtgctggacaccacgctgccatgcagcaagccatcctcgggaaactcaccggcgtaacgcgcctggccggtgaccttgagcagaccgtcgacccggtccaagggtttgccgatggcagtcatgggcgttctcctgcgacagcggcatcactcagggcacgaatgatgccccggcgcgccagcttgattttgaagccgttgtgcgccaggggttcggcgtcttgcagcagggcgtcggcggcttggctgaaggtttcgcggctgacgacctggccgatcagcccggcttccaccgcgcggtcacgccagggtttgtgggccacgccgccaagcgccaggcgtgcgtcgacgatgacgtcaccgtccagctcaagggctgcggctacagataccaaggcgaaggcgtaagaggcgcggtcgcgaatcttcaggtagttgctatggcttgccaggttgtcggcaggcagttcgatggcggtgatcaactcatcgtcggccagcaggttgtcgcgttgcggcgtgtcgccgggcaaacggtggaagtcggcgaactcaatgatccgcgcaccgccacggccctcgacatgtacccgcgccgccaatgccgccagggcgacacacatgtccgaagggtgggtagcaacgcactgctcactcgcccccaggatcgcatggattcggttcaagccggtgcgcgccggacagccgctgccgggctcgcgcttgttgcacggcaccgtggcgtcatagaagtagtagcaacgggtgcgttgcagcaggttgccgccagtactggccatattgcgcagctgcggcgaggcaccggcgaggatggcctgggagagcaacgggtaacgctgttcgatcagcgggtgccaggccaagtcggcattgctcaccagggcgccgatcaacagtcctccgtcggtcgtctcctgaatgtcatgcaacggcaggccggtgatatcgatgaggtgctcagggcggctgatgttttctttcatcaggtccagcaggttggtgcccccggcgataaagcgcgatgcagcgctgctgaggtgcacggcctcctgtacaccggtcggccggctgtaatggaaggggttcatggtttgccctccaggacttcctcgatagcatcgcggatattgctgtaggcgccacagcggcacaggttgccgctcatcaattcctggatttgcgcggtgtcatgggcgcggccttcgttggccaggcccacggcggaacagatctggccgggggtgcagtagccgcattggaaggcgtcatgcttgataaacgcctgctgcatcgggtgcagttggtcgccgtcggccaggccttcgatggtggtcagctcggcgccgtcgcacatcaccgccagggtcaggcaggcattgatccgcttgccatcgcgcaacactgtgcaggcgccgcattggccgtggtcgcagccttttttgctgccgacaaggtcgagttgctcgcgcagcaggtcgagcagtgtggtccagggcaacacatccagttggcgatcctggccgttgaggctcaggcgtatcgagtgactgacgaacggttgggccgccgcgccattgggggttgcgctcataaacacctcacgggttggtggacatccgcggcgttcagggaagtcgccgtctcaggggtacgacttcccggggtaatgagcgttcaaggtgattgatcagcggatattgagcaatgtcgtcagggtgttctgcggagggttgatcgaggagttgctgtattggaaccagccctgggcctccacgttcaggtcaaacacatagatgtagcccatcagcgtgccggccccgttgcaggcctcgctgatgttgcccacctggcagaccgccgtgcgctgcccattgagctctgcgccatcaaagcggcctatggggttgttgcccaggccgacctccatgaccgacactttggtaggcccacggtgcgtgcacatctgcgtgctttgtgcgcgctccgggatggtttccgtgcacgccgccgattcaaccttgaacacccgcacttcgctcaacggcggtgcagtcgcgccccaggccggtgctgcgccgagcaacaggctgatacaggggatcagggctagactccacgggctggcgtttttcatgttgcagatgaccttcgtttaaacgtcggcgcagtatgcctcaaggcctcggctgctggtatgatgcgccgctttttccgatcctctctgaaaccaaaggcgcttggcgcagtttgtgctttgacttagaggtcaacaaatcacgacgccacagagcgtcacagggagcaggcatgctggaaaagctgtttcaactcaaggcacacaacaccaacgtgcgcaccgagatcctcgcgggcatcacgacattcctggccatggcctacatcctgttcgtgaacccgagcatcctcggcgagaccggcatggacaagggcgcggtgttcgtcgcgacctgcctggcggccgccatcggttcgaccgtgatgggcctgatcgccaactacccgatcgccctcgcgccgggcatgggcctcaatgccttcttcacctacaccgtggtgctgcacatgggccatacctggcaggtggcgctgggtgcggtgtttatttcggcggtgttgttcttcctgctgtcgatcttccgtatccgtgaatggatcatcaacgccatccccctgcccctgcgctcggcgattgccgccggtatcggcctgttcctggccttgatcgccctgcacaacgccgggatcgtggtcagcaaccccgccaccatggtgggcctgggcgacttgaaacaaccggcaccgattctcgccaccctcggttttgtgctgatcgttgccctggaagccttggccgtgcgcggcgcggtgttgatcggcattctcgcggtgaccatcgtttccatcctgctgggcgttacgccctttggcggcgtgacgtcgatgccaccgtccctggccccgaccttcctgcaactggatatcaagggcgcgctggatatcggcctggtcagcgtgattttcgccttcctgttcgtcgacctgttcgataactccggcaccctgatcggcgtggccaagcgtgccggcctgatgggcaaggatggccacatgccgaaaatgggccgtgcgctgatcgctgacagcaccgccgccatggccggttccctgctcggcacctcgaccaccaccagctacatcgaatcggctgcgggtgtgagcgccggtggccgtaccggcttgactgccatcgtggtcgcgatcctgttcctgctggcgttgttcttctcgccactggccgccagcgtcccagccttcgccaccgcgccggccctgctgttcgtggcggtgctgatgacccagggcctggccgaaatcgactgggacgacattaccgttgcagcgccggtggtgatcaccgccctggcgatgcctttcacctactccatcgccaacggcatcgccttcggtttcatcgcctggaccgccatcaagctgctttcgggccgctatcgtgagctgaacccggcgctggtgattctgtcgattctgtttgtgatcaagctgggctggttcaacgcatgacttttgacgccgcacgctacaccgctcaactgcaagacaaggtcacacgcttgcgtgacctgctggcaccgttcgacgcgcccgagccgcaggtcttcgactcgccgctgcagcacttccgcctgcgcgcggagttccgcctgtggcgcgaaggcggtgagcgccactatgcgatgttctcccaggacgacaagcgcacgccgatcctgatcgaagagttccccatcgccagccagcgcatcaaccagttgatgccgcagctcaaggccgcctggcaagccagcgccgccctgagccacaagctgttccaggtggagttcctcaccaccctggccggcgatgcgatgatcaccctgtgctatcaccgcccgctggacgagcactggcacaccgccgccaaccagctggctgccgacttgaatgtcagcatcatcggccgttccaagggcaagcgcgatgtgatcggccatgactacgtggtggaaaaactcgacgtcggcggccgcaccttcagctaccgccagcccgaaggcgccttcacccagcccaacggcacggtgaaccagaagatgctcaactgggcctatgaagccttgggcgatcgcccggatgatctgctggaactgtactgcggcaacggcaacttcaccctgcccctggcgacgcgcgtgcgcaacgtgctggccaccgagatcagcaagacctcggtgaatgcggcgctgagcaacctcgatgaaaacgcggtgggtaacgtcaccctggtccgcctctccgccgaagaactcaccgaagccctcaacgaagtgcgcccgttccgccgcctgcacggcatcgacctgaaaagctatgaattcggcagcgtgttcgtcgacccgccgcgcgctggcatggacccggacacctgcgaactgacccggcgcttcgacaacatcctgtacatctcctgcaacccggagacgttggccgcgaacattgcgcaactgcatgacacgcacacgattacgaaatgcgcgatgtttgatcagtttccgtggacgcaccatatggaatccggggtgttattgactcggcggtaactcggcgtcctccggttgcttcttgcgcggccgcccgcccttcttgccattggcacgggcggcagcggctttggcggcgctgcttttgcgaccgttgcgcgaggcaaccaggctgatcgccaggtccatcaggggtttgctggtggcaatcaggccagtgatcgaaacgtccaggtcttgggcctcacagcacagcgcctttccgccaaagccgacctccagttgctcgaagtcctccagggaaaaccccgcgaactcgggcaggccagccaccggcagtacaacgcgactgccgtcgctgaagccgatggaaatgcagttgtcttcataacgcacagcgctggcgcgggcataaaggtgccgcgtcttgcgccctcgggctatcgccttttcaacgtcggcctcagtgagtggtttatagggtacaaccttggcttttacgattttcatagatcaatccccacgcagtctggtgcccttaccagattcaaaattgtccgttgcgctacgacatcgtgccgagcacttgcgatgacatggactccacgccgaataaccaaccctggcaccaactcaccggcgtcccaatcccaggaatgattctccagacagaccgtttgcaggtattcccaccagatcctgcgtgcccgtgccaagtagtgccgctgcatgatcgccccgcgtatttctttcaaaaccgccaggggtggctgcctccgctcaggctctacgtcccacaactccacgtccccatccagaaaactgaaacgaaaacgcgcatcccattccttgccccgcacatgcacatggggcgggcaatgctcatccctgatgaacaccgaaatcacatatcccttgtaaacgcctactctcatcgtaacccatccgttaggttattttccgccaggtaacaattttcccctgccacccgacaaccggcttcatctacccgaagctgtttcacagactagtaagcacaaaaaacccggcgaaggccgggttgtaaccactcatgccgagggctggaaatactccgccaacgcccgcagatcctgctcgctcagcaaccccgcgtaatacttcagctgaatcctcgccagcagatatgcatgccgcgcattcgccaggtcgcggcgggcagtgaacagttgttgctcggcgtcgagcacgtcgaggttgacccgctcaccgccggcaacactcttctttgtcgcagcgaccaacgccgtggcagagctgaccgccatttcataggcacgcactttggctgcgccgctggtgttgaggttgaactgcttgcgcaactccaccagcgtggccgaggtttgcgcgtccagttcatattgggcctgggacagttgattagccgcctggcgcgtggacgccgacacgccaccaccggcatacagcggcaggctgacctggatgccgaccgtattggtgtcgtacttctggttgtagctgctctccgagtcggagttggtctggcggctcgtggcgtacaagctgaccttgggcaggtgcccggcgcgtttgcgttccacttcataggaggccacgtccagggcgtggtgctgggattggagttccgggttgttggccatggccagttcgcgccaggtttcaaaacggttgggctccagcggcgggatctcgaattggcgcgtcagcggcgccagttcttcgatctgcaacggttggccgacgatggcttccaactcgcgcagggcactgtcctgggtatcctgggattcgatctcttcggcctgggccaggctcagccgcgcctgggtttccagcacatcggtacgggtgccttcgccgcctttgagcaggcgatcattgagttgcaggcgctcggcatacgcacgtttctgcgcgcggctcagctcgatacgctcctgggccagcaaggcctggctgtaggcgttgagcacccgcaccgccagttcctggctcttgccacgaaaacgctcatcagccatcaaggcctgggcggtgccctggcgaaagcgcgcgtaggcctcgtaatccagcagcggttgttgcaaggtcagggtcgacgcgtaactgcggtagtcacggtcactggtgacatcacccgccgtcacttcggattcgttgcgcgagttgttgtagctccacgataggttcggcaacagcgccgcgcggccgatcacgcggttttcttcaccggcttcacgcgcctggatcgcggcctgaaaggtcgggtcattgcgcagggccagatcgtaggcatccagtaaccccaaggcgtgcgccgaggtacaccccaaacacaagataaacagcagcgccttcattcttccaccagcgccatgtgggtgcgatccatcaacggtttgaacaggtagttgagcatcgagcgctccccggtcttgacgaaggtttccaccggcatgcccggacggatctgcacgccgtccagttgctgcatgcccgccgcgctgacctgggcacgcagcgtgtaatagggctcgtcggtgcgctcatcgacctggcggtccgccgaaaccagggtcacctcaccggccacccgtggcgtggtggattggttgaacgccgagaacatcaactccaccggcaagcccggatgcactttgtcgaccatctgcaccggcacccgagcttctaccagcagcggctcgccctggggcacgatgtccatcaacgcctggccgggcttgatcaccccaccttcggtgtacacgtccagccccaccaccaccccggacgccggcgctcgcaccaggctgttggccagttcgaactcggccgaagccaggcgattgcgcaggtcgtcgctgcgggtgcgggtctcggccaactggccgcgcaggtctttctggaagtcttcgccaagctggcggatgcgcagacgcagttcctgcacctggcgctgcaattggccgatgcggccgtagtcttcggcgatggcgccgtcgatctgggaatacaggcgctcgctgtcgagcaggcggttgcgcgggatgtaaccgtcacgcgccaactcgcgcaggccttgcagttgctcattcaacgcggcccgttgctggactttgctcgcctgcgaatcccgcgtgccgcgcaactgggcctcggcgccggcgatggtttcgcgcaggccttgttgctcggtggccagtgcctgggcacggctatggaacagttgccgttgcaggctcagcgtgccggtcgcctcaggatcgttgagcagttccgggccgaaggtgatcgccgccagcccttagctttcggcacttaaacgcgcttcgctggccagggatgccaggtactggctgcgcagggactgcatctgcccgcgcaacggggtttccttcaagcgcagcagcacctggccagcgttgaccacatcaccgtcgcgcacctcgatacgttccacgatccccccggccggatgctgcaccgtcttgcgatggcccgaaaccatgaccttgcccggcaccgccacgcccttgtccagtggcgcccacgctgcccagccgaggaacccggcaaagccgccgagcaccaacagccaacccaaacgcgaatattttttatcatccagcgccagcacattgttcggcgcatcactgatcagcacgggtttgctctggttcatgcctgttttccttcaccgaggcggtaactcatgctcagggtcgacaccggtttgctcgccgccggtgtctgccgtgcctccaacacccgtgccgtcgacccgaaggcctgcaattggccgtccttgaggatcagcaaccggtcagtcagggtcagcacgttgggcttgtgggtgatcaggatcaccgtgcggcgctgttgcttgagctgggcgatggcttggagcagggcttgttcgccgacttcatcgaggttggcgttgggctcgtccagcacgatcaacgcaggcaggccgtacagcgcacgcgccagggcgacccgctgtttctggccaccggacaatccagcaccaccctcacccaatggcgtgtcgtagcccaggggcagttgcagaatcagctcatgcacgccggccatttgcgcggcggcaagcactttgtccgcctcgacctcggcaaaccgtgcaatgttttgcgcgatgctgccggcgaacaactggatgtcctgcggcaggtagccgatgtgcgggcccaactgctgtttgtcccacagggccaggtcggcaccgtccagccgcaccttgccggccaagggtgcccaggcgcccaccagtatccgggccagggtggacttgccgcagcccgacggcccaatcacccccagcacctcgcccgccgccaggctgaagcccaaattggccagcgccggtcgacggctgccgggggcacaggcgctgatttgctcgacgctcagttgccctttgggcaccggcaagctcatgcgttcgggccgtgccgggttggcctccagcatctgtgacaaacgctcaaaggccaggcgcgccgagccccactgcttccacacgccgatcaactggtcgatggggctgagcacgcggcccatgaggatcgaaccggcaatcatcattcccggcgtgatggcgccctgcaccgcgagcaacgcgcccaggcccagtaccagcgactgcaacgccaggcgcacgcccttggaccaggcggtgacggtcgcggtcttttcactggccaggttctgctgcgccaggaacgcttggtgctggccgaaccaacgcgcgcgcaacgtggcgagcatgcccatggcttcgatggtgtcggcattgcgcaggttggccgtggcctgctggctggcgctgatcgacagttggctggccagggccatcggcgcctggctgacgtgatggttgacccacgccagcacgatcagcagcaccgcaccgaccagcgccaacagcccgagccaggggtggaacaggaagatcaccagcaggtacaccggaaaccacggcgcatcgaaaaacgcgaacaacgcctggccggtggcgaactggcgcagggtggtcaggtcatgcagcgcctgcccggccgcctgggtaccgcccttgagttgcgcttcgaacgcggcgtcatacacccgctggttcaggcgcatgtccatctgcgtgccgaggcggatcaccacctggctgcgcacccactccaacgcgcccatcaggccgaacaggccgaggatcatcagcgtcagcatgagcagggtcatctgattgcccgaggccagcacccggtcgtacacctgcagcatgtacagcgccggggcgagcatcagcaggttgatcaccgccgagaacaggccgatgttgaagaagccacttttataggccgtgagggcggccagggtttcgttgccggcgtggcgcatctggggattctcaaagggttgagcgggcagcgccgtcgcgttgacaggcggtacgacgctgcgcagaattcggcaccgccgtcgctgaagaaatagaaggcttgggcgacggcggtgtgtcatgcggcgaatgggagagcgatcttccattcgcttttttgcttaagcggccagggcgaagtcctgaggcacgtcttgcacgcccaccagggccacatcggaggcggcgacagcagccgagtccacatgggccacaccggctgcggccagttggtcgaacgtcgagttgatcgacaggcttgggtcgatgtccttgagcagggagtcgatcgccgacgccagtgccgagctgtcgccgctcatcaggccgtagatgatcttgtgcacctggccatcgcggccttcggcctgcaggctcgacaggcccaggttggcgaagctgacttcctgctcagcgagggcgtagctaccgccggcagcgccgccggtgaggaccgtgcccaggttcagcgagtcgatcgaaccccacaaggtgtgcgacggcgggttgaacaaggtgtaatgcaggtcgccgttggccaccaccgccgcgttgctgacagtgctcgacacgccatattgggtaccgtcgaacgggccaggattgaaaccaccggtgttcgaaccctctttgaccgacccttcacggtggttcaggtcaccaaagtaagccgaccagtcgctcaggtactcggcaacggtgttagcggcgtaggcggtgctgtatgaaatagaaatgctcatgcaaaactccaagtcatggggtggtatctccgcagcaagccagtgcctgctgtggttttgcccgtcactgggcaaaatcggtcagaactgatattcaacggtgccctgcaacgtgcgcccacgccccagggtgaaggccaatacgtcgcccagtggcaccaggtaggcgcggtcggtgacgttttccatggccaggcgcagggtcaactgctcggtggcgcggtagctgctgtacaggtcgtagacggtgtagggtttccagtcggccggatagacaccggtttgcgaggtggtcacgccggcgccacctttgacgtagtaaccgccgctgtagcgggcacgaacccccacatccaacgtgcgctcgaagaagcgtgcgcccagcgtcgcggtgccacggtccatcggcatgtgttcggaggagcccaggatcgcgctgcagctctgccccgcattggccacgtcgtccggcaccatcgcgtctaccggcgcccggctgcccggccctttctggatcttggtgacgccacccagccacgcggtcttgctgcagaacgtattactgccgagcatgcgcgtgtagttgaactggccgtaggcaaacccggcgtcgtaatccagctgatactcaaggccgcgaaaacgcgtggtttccaggttgttcacatacgccgcattaccgatgttggcgatgccataaccgggcggctgcacccccagggccatataggaaaagtcatccacgcgggtgttgaagtaggagaccttcatgcccacgcggtcctcggcgaacagcaggtcttccttcagcacgttgaagccgacctcccaggccgtggacgtctcgggcttcaagtaagggttggggaaaatcgattccgaaccgccgccatgtggccggccgctgaccagcgattcggtgacggccggcgggcgccagcccttgccgtacgtggcaaacaattgcagccaatccacgccgggcttgaccgacaggccaaaggtcggcgagaaatgcccttcctcccgatccacgtcataggtcatgggcaagccgacctgccgagttgtgccgataatgaaggtacgggtattcaggccggtttcaccgcgcagccgatagcggtcgtaacgcaacccggcattgaggttcagccagttgtcgtagtcgtagtccaggcgcgcgaacaggctgcccattgcccgatcacccttgggcgtgatgctttccgccgccgaggccgtcaccgccgaatcggcggccaccatctggttggagtccggccggaccttgtcgtagaaaaactccaggccgtagttggctttgatcaccgacagctcgctcaaggcgaaggtcgaaatattctgcgcctgcacaccataggtgttggtctgataggtgacgtcgtagcccttgctgctgccacgggtcagcgtgctttggtcattgcgggtgtcgacgtagtagagcttggccttgaaatcgatcagcgggttgtccggcgtgtagctgtagtccaacgcgaagttctgcgccgtgacgttgctgctgccgagcttttcccagagctgggctttttcggcggtcatcatgttgacgtcgtcgtagtcgacttcggtggtcaggtagctcagttgcaggcgctgatccaccggcaggttcagacccagcttgagcaggcgcgagcgcatcaccgagccggtgtactcgacggtggagtttttgatccggtcttcactggccggcaggaaggaactgccggtgcgcaactcgccgatgctgccccgggtgccgggtttgtagtcaccgagatgacgctcactggcggccaccagcatgtcccacacatcggtgcccacggcaaacgccgaactgccgataaaatgcgtgccgttgctgcgcccgcccaacccggtggtcaaacggatgcgcccaccgatttccttgccgcccttgagcaggtcggcggcttccacggtgcgaaaattggccaccccgccgatcaccccagcgccacccatcgtcgaagtagcgcccttctcaatcacaacttccgacagcaattccgggtcgacatacagcgtgccattgcgttgctggtgaccactttgctggtagttctggcgcatgccgtccactgacatgttgacccggccgtagtcctggataccgcgaatgttcaccgacaggccagggtcttgctggctgaccgccgagtagacacccggcgcctcttcgagcatctcggcggcatgccgtggtgggttgcgatccagttgctcacgcccgaccacactcaccgagcgtggcgatgaatacacccagtcgttggggtgcaggccggtaatcgtggtggtcgccagcgccagcgcggcgccgctctgctccacgcgggtcagggtgacttggcgctcgccattgaagcgatactccaccggcgcattccccagcagacgcgccaacccttcctgcacgccgtattgccccttcaccgccgtgctctgcaaaccggccaggcgctggctgtcgaacagcacttgcaggccggcctggtcggcgaatgccagcacggcactgcccaggggttgcgcggggatatccagcatcagcaccgcaggttgcgccgcattcgcctgagactgagcagcgaatactggagccactgcggcgaacaggcccaagtggatggccagggctaaccggcttgcggtgatacgccccttgttgagtgctgacatttctgtggttccctgcgttgagcgttttcttgtttatgcgaatgcttctcacctagcaagacgtgcgacgcgcaggaagtcagtaaggttttttgaaagtttttcaggaagggggatttcaggcggtgggagcaggcccccaccgggtcatcaatagatcaggctgaggcctgccaggtccaagcgttgcacttgcagttcctgggtgagcgtgtcgagagcggtgtcgagcatgtcgaggcggaacacaccgctgacttcacgatcgcccaatgccgagtcgatcaacaccacgcgcccggggcggtagcggttgagctgttcgatgacgttggccaacggctggcgatcaaagatcaacacaccgcgtcgccaactggtggcgcgcgctacgtcgagctggtccaaagggacgatgccttcctgagtgctgtagcgtacggcctggccttctttgaccactctgtcggccggaccttttttcgggacagcttgcagcgtgacctcgacactgtgctccaacacgccggtccacgcctggctatcgccctcgcgctccaccacaaaccgcgtgcccagcgcccgggtttgtcccccggcgctctgcaccacgaacggtcgggtttcttcgcccaccctcggtgccacatcaaagatcgccgagccttgcagcaggctgattcggcgttgcacaccgtcgtaatccaggcgaatggcactgccggaatccagctcgaccttgctgccatcggccaggtgcacggtgcgcacttcgcctttttcggtgatgtagtcggcctgcatgcgcagcaacaggtccggcccacgcccccagccgacaccggctaccaccacgaccagcgcaacggcagccgcacgctgccatggccggcgccgcctggtcccgcgcacaggctgcgtcgccgccgacgggcgctggcggttcaccggcggctccttgtacacctcgcccagtgccgcccaggtctgttcggcaaagcgcaatgccgcttcgtggcggctgtcgcaggcgatccaatgccgcaactcggcctgctcctgttcggtcagggcaccggcgtgcaggcgcaccgcccactcggcggcctcctcggtaatgctgtgctgttgcggaccctggctattcacgtgtgaatctcgaatttttcgttatataacgctgtgacgagtgaacgggcgtttttcggtaattcattcgtcggatggcgccctctcgccttcctgcaagcgctgcatcacgtaggccaacgctttggccagatgcttttgtactgagctgtcagagatgtccaggtgccgggcgacctgggcgtgggtcatgccttcgatgcggttgagacggaaaatctgctgggtgcgttccggcaattccgccagtgcctgcttcaatgcctgtcgctgttgctgcgccattgcctgagcctccaacccggccacgtcatcttcaatctcggccagcgcctcatggggcacggagtctgtcttgcgccgcgcttcctggcgaatatggtcgatcagcagattgctcgccgttcgatagagatagccctgggagttgtcgatgcgctcgccggccggcttttccgccaggcgcaggaagctctcctgcaccaggtctgcggccaattgcgggtcccgtaccttgcgcgccagatacccgcgcagggtatcggcatgcttgagaaacaggcctttgagatccacgtccgacaaaccgactccctggaatgttaaggaaacaggcgggcatcttaagcgttgtcgagaatgattttcaattgatatctaatctgatccggcggtatgaaaggcctgattaacagttcggtaatcgaacacatccgctgcgatcaattgaccaaattaaccaaccagtacattttatccccacaacgaacaataactgtggagagacgccccatgccgcctatcgtgctggtgctcaacggccccaacctcaacctgctcggcactcgcgagcccgccacctacggccatgaaaccctggctgatgttgctgctttgtgcggccgaagcgctgaacagttgggcctgaaaatcgaattccgccagaccaaccatgaaggcgaactgctcgactggatccacggcgcccgcgcccgctgcgccggtatcgtgatcaacccggcggcctggacccacacctcggtggcgattcgtgacgcgctggtggccagtgaagtgccggtgatcgaagtgcacctctccaacgtgcacgcccgtgaagcattccgtcatcactcctttgtctcgcccatcgccaaggccgtgctcgcgggtttcggcagccatggctaccacctggcactggaacacttcagccagttgctcaaaggatcggcccgatgaaaccgcgcattctcgccggcctgatcggcgccggtatccaggcctcccgtacgcccgcgctgcatgaacacgaaggcgatgcccaaggcttgcgctacctgtaccgcctgatcgaccttgaaccccggcacctggatatcgacgccctgcccgatctgctgcgcgccgccgaactcacaggctttacagggctgaatattacctacccgtgcaagcaggcgatcctgccgttgctcgatgaactgtccgacgaggcccgtggcatcggcgcggtcaatacggtggtgttcaaggacggcaaacgcatcggccacaacaccgattgcctgggatttgccgaagggtttcggcgcaacttgagtgacgtcgcccgccaacacgtggtgcagatgggcgccggcggcgcaggtgcggcggtagcccatgcgctgctggccgagggggtgcaacagttgagtattttcgacgtggaccccgcccgcgcccgcgaccttgtggataacctcacgctacgtttcgggccgggccgtgcccaagtgggcaataacgtgaaaaacgccgtggccgaggccgatggcctggtgaacaccacgccgatgggcatggccaaactgcccggcacaccagtgcccgccgcctttttacgggccgaactgtgggtggcggaaatcgtgtacttcccgctggaaaccgaactgctgcgcgatgcccgtgccctgggttgccgcaccctggatggcggcaacatggcggtgtttcaggcggtgaaggcgtttgagttgttcagtggggaagtgccggatgcgcagcggatgctggcgcacttccagagcatgaatacctgactgagttggaataaaaatccaaatgtgggagggggcttgcccccgatagcggtggatcagccagcttatctgtagctgacccactgtcatcggggggcaagccccctcccacattttgaatgcattccaacctgaaacttcaggcctggaggtaacgcatcaccgaatcacaaatcatgtcccgatgccgctgtttaaccacctcatccgacaggtcgatctgaaaaatctcactgaaggtatggcggttggacacccggtaaaagctgaatgagttgatcagaaggtgcacgtccagcggctccagcccttcgcggaacaagcccagctcggcgccacggcgcaaggtttcccccagcccttcaaggatcttgctgttcatcgccttgatggtgtctgtgcgcttcacgtactcggcattgtggatattttcgatgctgacaatgcgcacgaaatccacgttctggtcatggtgatcaaaggtgaactccaccagccgccggatcgcttcacgcggttccagggccgtgaggttcatgcgcgtttcggtgttgcggatgtcgccgtagagtttctccagcacctcgacgtacaactgctccttgctgccgaagtagtagtagatcatgcgcttggaggtgtggatgcgttcggcgatcgcgtccacgcgagcgccggaaaggccctgctggacaaactcgacgatggcttcctggagtatgttttcgcgggtcttttccggattgttcttacgactcttgcgaggtgcctcggtggtcatggtgcgctcacggccagtgttatgcaggccgtgattatgggccgcgatgccccccgaaagaaagcacccgggccgccgttataaacgcgcctggcgcaccgcgccgctgcgcgatttggccatggccgccaggcgcaccgccacgttggccgcgccgtagccggcataaccgttcttgcgctggatgatctcgaagaaaaaccgcccttcgaagggttcggtgtacacgtgaaacagctcaccgccttgggcgtcacggtcgtacagcacgttgtagtacgccagctcactgaggaattcatcgtcgaaatcgaaacgcgccgccaggtcgtcgtaatagttgagcgggatatccagcagcggcaccccggcctccttggcgcggcgcacttcggcgaagatgtccgcgcagtcgaaggcaatatggtgcacgcccgagccacgatagctcgacagcgcatgggaaatcgcggtgttgcggttctcagagatgttcagcggcaggcggatcgagctgcaacggctgcgcagcgcgcggcttttcaccaggccgtaagggtcgggcagcaccacttcgtcatcggcttcgaaatccagcaggctcttgtagaacagcacccaactgtcgaggctatcggccggcaaggccatggccatgtggtcgatgcgcagcaagccgccgctggaggacgcggcgggctgcaggttgaagtcggtgtcgtagagcccgccttcgctctgatccaccaggtaaatcaggctgccatccggcgcacgcaccgccgccagctccagctcattcggcccgaccaggccgcgatacggctggcctttgtacgccaccgcccgctccagcgccttggcgctgtccctgacccgaatcgcggtggcacacagcgacggcccatgggcttcgaaaaagttgtgggcaaacgaatagggttcgcagttgaggatcaggttgatatcgccctggcgcaacaggcttacgctcttggagcgatgctgcccggccttgacgaaccccaggcgttccaaccagtgggtcagcttggcgccaaggctctcgtccacggcgaattcgaggaactcgatgccgtcgtattcgctggccggcggggtatcaaacagaatctccaccggttgcgccggtgcttgctgtttcaggcgttcgcgggttttctcttccaggtacagcaaggagcgcaggccatccgccgcgttcgcacgggtgggcgcggcgcggaagccgtcgttgaaaatttccagggacagcggcccggtgtagccgctcttgatgatcggcgcaaggaaccctgccaggtcgaattcgccttggccggggaagcagcggaaatgccggctccactccagcacgtccatggccaggatcggcgcgtcggccatttgcacgaaaaagatcttgtcgccgggaatctcggcgatggcgctcgggtcgcccttgagggacagggtgtggaagctgtcgagcaagacgccaaggctcggatgatcgacctgacgtaccaagttccacacctgttgccaggtgttcacatgcttgccccaggccagcgcttcataaccgatgcgcaaaccacggcggccggcatgttcggcgagcaggccaaggtcatcgagcaaaatgcgctcgtcgcccacgcaatcggccgaggcattgctgcacacaagcaccaggtcggtgcccagttcctgcatcaagtcgaatttgcgttcggcacgttccaggttgcgggccaggcggtcacggcggcagccttcaaagtcgcgaaacggctggaacaaggtgatggcaatgcccaggtcggcacacatttgcctaacttcgcgggggctgccgtcgtaatacaacaggtcgttttcgaagatttctacaccgtcgaacccggcggccgcgatggcttcgagtttctccggcagggttccgctcaaggaaacggtggcaatagagcgttgcatgggcgactcccggcatttaaggcgcgtcttatttacggcaaattattggccgctaaactgttcacagcaattaaaatgtacgaaccggttagtttttggtgcgattatcgaacacaaagccgttttggcgaattgacgattttttagccactgcgcaccatcgattcagtaacaagacccagaacacaccataaaaatttcaaaaaacgggtacgacctcatgcctctgcaaaactccgtcctggccgaccgcccggacaccccgcacgccggcatcggcgacaagatccgcggcgccctggccgtgggtaaaacgcgctggggcatgttggccctggtgttcttcgccaccaccctcaactacatcgaccgcgccgcattgggcgtgatgcagcctatcctcgccaaggagatgagctggacggcgatggactacgccaacatcaacttctggttccaggtcggctacgccatcggctttgtgctgcaggggcgcttgatcgaccgggtcggcgtgaaacgcgtgtttttctgcgcggtcctgttgtggagcctggccaccggcgcccacggcctggccacctcggcggtgggcttcatggtctgtcgtttcattctcgggctgaccgaagccgccaactacccggcctgcgtcaagaccacacgcctgtggttcccggccggcgaacgggcagtggccaccggtatcttcaacgccggcaccaacgttggcgcgatgatgacgccgatgctgctgccgttgatcctgcacgtgtggggctggcaggcggcgttcctgtgcatgtcggcactcggcgggatctggctgctgttctggggcttgaaatacttcaacccggaagaccatcccaccgttaaacagtccgaactggactacgtgcagcaggaagtcgaaccagaacaaccccgcgtgcccttcagccgcatcctgcgcatgcgtggtacctgggccttcgccctcgcctactcgctgaccgcgccggtgttctggttctacctgtattggctgccgccgttcctgaaccagcaatacaacctgggcatcaacgtgacccagatgggtatcccgctgatcatcatctacctgaccgccgacttcggcagcgtggggggtgggatcctgtcgtcgttcctgatcggccgtggcatgaactcgatcaaggcgcggctgctgtcgatgctgctgtttgcctgctgcatcgtcggcgtgatcatggcggccggctccagccagctgtgggtcgcggtgtttgccatctccctggcaattggcgcgcatcaagcctggaccgccaacatctggagcctggtgatggactacacgcccaagcacatgatgagcacagtgttcggttttggtggcatgtgcgcggccatcggcggcatgttcatgacccagatcgtcggccacatcctcacggtcacgaacaacaactacaccgtgttgttcaccctgatcccagcgatgtacttcattgcgctgacctggatgtacttcatggcaccgcgcaagatccctaccgtagacgtttgatctatcgtctcagctaccggcgccgctgctgccaggcagcggccagcccgctcatgcagatcaccccgataccgaccaccgtggtcaggtccggggtgtggttgaacaccagccagcccaacaaccccgcgaacacgatctgacaatagccgaacggcgccagcaaggccggtgccgcgaagcggaacgcctgggtcagcatcaagtgcgcggtcatgccgcaggtgcccagggccagcatcaacaccccatgccacagcgtcggcacctgccagaagaacggcaccatcgcactcatcaccagggtattgcacaggcctgcgaagaagttgctggtggtgggcgtgtcgtattggctgaggatgcgcgtgagcagttggtagaagcagaagaacagcgctgaacacaggggcagcaagaccgccggggtgaacagttcgccaccggggtggatgatgatcagcacccctacaaacccgcagatcaccgccagccactggccacgcgtcacatgctcgccgagcagcggcaccgagagcgccgtcaccaggatcggtgcgaggaagttcaccgccgtggcttccgccagggggatgaagtgcagcgccgaggtgaaaaacaggctggtgcccaacaggcataacgcccgcaccacctgcatccccggccgtttgctgcgcagcacgcgcaaacccgattgcggcaggaaaataccggccatcaacaaggtgtgcaccaggtaacgcgcccacaccaccatcacgatcgggtaaaacccggccaggtatttggacaaggcgtcatggctggagaacaggaacgtcgccagtacaatcagcaaaatgcctttgaaggggtgattgacgccggaaaggggggtgctgacagtcatggaattctcttgcgtggcgagctgaacgcgtggcactcaacccggtaatctagcagccgggcctgcgtctgcccctagagcataaccaaacaccgtgcgaacagcgcactaaatcaccggattcgagtccaacgctgcacgttgactgccgtgttgcacactttttaatcaaggccttgccgctatgaaaaaaatcctctttgttctgtctgcccttgccctgctcaccgcatgcaaccagcaagaggcgccagcccccaagccggccccggcgtccgtacaagccacactggtgccggcaacgccgcccaccgacaaatgggtcggcaagtggatcggcgtcgaaggcctctacctcaccatcgccaaggacgacagtatcggccgtggtcactacatcctgaccatgaagtacggccttgatgacgacgactcgggcaccttcaaaggtgaagccaacgaagacggcatcgcctttacccgtccggacggcccgcagcaactgagcgccggcgacggcgaagccaccggtttgaaatggttggcggataaaaaggattgcttgatcgtcgataccggcgaagggtattgccgctaataacggccatactcaacccacatccctgtaggaccgttcatcaaagaggattgccccatgctatggaaaaaaggccgacgcagcgacaacgtggtcgacgcccgcgatgacagcggcggcggtgggggcggtatgcgctttgggggcggcaagggcctgagcctcacggcgatcgtgctgatcgtcggcatcggctggctgaccggccaggacccgatgcagatcctcggccagttgaccggccagctggaacaggcaccgtcagtgagcacgcagacgcgccaggcgccgccggccaacgatgagcaggcggattttgtccgtgccgtcctgggcgacaccgaagacacctggggccaggtgttccaggaaaacggcttggcctacaagaacccgaaactgatcctgttccgtggccgggtcaattccgcctgcgggggtgccacctccgccagcggcccgttctattgcccggctgaccagcaggtgtacctggacctggatttcttccgggaaatgtcgcagcgcttccaggccgccggtgatttcgcccaggcctacgtgatcgcccacgaagtcgggcaccacgtgcagaccttgctgggcatctcgtcgaagatccaggcggcacgccagcaaggccggcagatgcaaggcgatggcggcctgctggtgcgccaggaactgcaggccgactgcttcgccggggtgtgggccaaccgtgcgcaaaagcgcctcaactggctggagcccggcgacattgaagaagcactgaacgcggccaacgccattggcgatgaccgtttgcagcaacagggtcaggggcgcgttgtgccagactcgtttacccacggcacctcggcacagcgggttcgctggttcaagaccggcttcgcccagggccagatcactcaatgcgacacgtttaccgccaagagtctttaaatgaataaacgattgggatggctgctgggcttgttagttacgtgttcaacctgggccgccgagcacggcgtcaaggacgtcagccctgatcgtttccacctggaggccggcgatctcagcctgggcttgagccaggactggcgccagccgctgccccaggtcacccgcgcgctgatcatcgtgcatggccgcctgcgcaatgcgcagacctacctgcacagcgctgaagacgccgccgagcacgccggccaggccaccaacacgctggtgattgcaccgcagtttctgaatgagtccgacgtcaagcgcaaccatctggaaaaccaggtgttgcgctggaacggcaatgactggatggccggcgagccttccaccggtccggggccaatcagctcctacggcgccctcgaccagatcatcaaacacctgggcaaccgcaagctgttcccagcgctgaaagaaatcgtggtcgccggccactccggcggcggccaggtggtgcagcgcttcgccctcaccggccacgaccacccaatgctgcaaaccgaaggcatcagcctgcgttacgtggtggccaacccctcgtcctacgcctacttcaccccacaacgcccggtgaagttcgacatcgccagttgccccggcttcaacgactggaagtacggcctgcacaacctccccgactacgccaagggccagagtgcccaacagcttgagcaggcttacgtgtcacgcaacatcacctacctgctgggccagcaggacaccgacccgaaccacccggcgctggacaaaagctgcgccgccgaaacccagggcgcgtaccgcctgattcgggggcgcaactattttgactacctcaagcagcggcatccgcaattgagccacacgctggtggaagtgccgggggtggggcataacggggatgggatgtttacgtcgcccgagggccagaaagtactgttcacgccataacctgtgggagggggcttgcccccgattgcggtctgccagctacacatgtgctgatttatacaccgctatcgggggcaagccccctcccacagttggtctttattgtctgggctggatcatctgatgcagcaccgtgcagtccgatgcatgccaatcggccaactccggccacgggttctccggcagattcaccaacaccgtccgcgtccccgccgcccgaccacaatccaggtcgaagcggtaatcgccgaccatcaccatctcgctgggcgctacttcccatgccgccgccagtttcagcaggccgtccggatcaggcttgggttgcgcgtcatcacgccccaacacatcctcgacggcaaagcagtccgccaggccaatggcttgcagggtgatatgcgccaactcccgcgcattgcgggtcaggatgcccaggcgatagccgcgcccggccagttcgcgcaccaggtccaccgcaccgtcggcagccactgaacccaacgccagctcgcgctcatgctccagcagccaggcatgcttggccgccgcaacctgcgccggcaacgctgccaggtgcgtgaggatgtcgtcttcgggcgggatttccaacgctacgcgaatggccgcgaaatcatgcaccgccaccgtgagcgtgccgtccatgtcgaacacccaatgtctaacgtccgccaggctcatgcccaatccttgcgatggcgaatcaggccttcctgggtcaccgaggccaccaactgcccggcgcggttgtacacgctgccccgggagaacccgcgggaattgccggcccacgggctgtccatggcgtagagcaaccagtcatcggcacgcaggtcggcgtggaaccacagcgcgtggtcgaggctggcgacctgcatatctttctgccatacggttttgccatggggcagcagcgaggtggtcagcaggccaaagtccgaggcgtaggccagcaggtatttgtgcagcgccggcgcgtcggccagggcgccgtcagcacggaaccacacgtacttgaccgggtcggacggctgcgggttgaacggatctttttcggtgaccgggcgcacttcgatcggcttggggcacagcagcttgtcacgcatgtgctcggggatcaggtgcgcacgctgctgggtcagttccagctccgagggcaggttttccgggccgaccaccaccggcatggtggtctggtggtcgaagccttgctcgtcgtactggaacgaggtggtgcaagtgaagatcgggtggcctttctggatagcggtcacgcgacgcgtgctgaaactgccgccgtcgcgaacgcgatccaccgaatacaccaccggcaatttcgcatcaccggggcgcaggaaataaccgtgcagcgaatgcacatgccgcgcttcttctaccgtctggctggcggccgacagcgattggccgagcacctggccaccgaacagttggcgaaaacccaggtcctgactgcggccgcgaaagaggttttcctcgatcggctccagggtcagcaggtccaccagatcttccaatacttggctcattgagcaactcctaaaatctatcgggcattccgggctgcctatccgtgcagcgtgtccaaccattgggcgcgggtgatgcggtacaaaacatgatggcgcagcgggtcatcggctgcgaccttggggtgttcaaaatctgcctggggatcgtaatgcataccgatggcctgcatgactttttgtgatggcagattggcttccgtggtgaatgaaacaatctcgtccaagttcagacgatcaaaaccacagcgcaatgcggtccaggcggcctcgctggcatagcccaggccccagtgttcgcgggccagacgccagccgatttctaccgccggggtaaagtcggcatcgaagctgacattcagcaacccggtgaggccgatgaattccccggtgtccttgcgttgcaaggcccacaggccaaagccgtattcggcgaagtggccgcgaatccggccgatcaacgcggcgctttccaggtggctcagtgtggccgggaaataacgcatcacctgcgggtcggcgcacatgcgcgcaaagtccggcaagtcgctgtcgcgccattggcgcaataccaagcgtgcgctttccaattcgagtatcggctccatgggtcccctcccttgccatgtgcgtgagtgtacaacgcgggtaagatgcgccgcaggttcccgtcagaaaatcccatgcctttgccattgatctaccacgatgactacagccccgagttcccggcggaccaccggttccccatggacaagttccgcctgctgcgcgaccacctggtgtccactggactgaccgaggacagccaactgctgcgcccgcagctgtgcccgccggaaattctggccctggcccatgacgcggggtatatcgaacgctacatgggcggcgagttgtcccgcgaagaccagcgccgcctcggcctgccctggaacgaagccctggcccggcgcaccgtgcgcgcggtcggcggttccatcctggcagcggagcaagcattggaacacggcctggcctgccacctggccggcggcacccaccacgctcactacgattacccggcgggcttttgcatcttcaacgacctggcggtgatcagccattacctgctggccagcggccgggtcaaccgcgtgctgatctttgattgcgacgtgcaccagggcgatggcacggcacgcatcctccacgacacgccggacgccatcactgtatcgctgcactgcgaaaagaacttccccgcccgcaaggcccagagtgactgggacatcccgctgccgatgggcatgggcgacgccgactacctcaaggtggtggacgatgccctcagctacctgctgccgctctaccagcccgacctggtgctgtacgacgccggcgtcgatgtgcacaaggacgacgccctgggttacctcaagctgaccgaccaaggcgtcgccgcccgcgatgaaagcgtgatgcgccattgcctgggccgcgacatcccggtgatgggcgtgatcggcggcggctacagcaaagaccgccccgcactggcccgccgacacggcatcctgcaccacagtgcgcagcgggtgtggacgtcatcaggttgtcactgaactgtgagcgttacccacaatgcctgtggaaccacctgtggataacttgagcgtaaggcgctgaaagccagaaccagtatagcccgtaggaagctgtacgttttttaaccagaatcctttccacaaccgtgaaacgttgtggaacatggcatttatggccgttttgcaacaaaactgccgcaccccgccatcaacctgagggcctcttccgctttcagagtacccagcgatggcaacctacaagatcggcagcagctcgacgcccggcaatgacgacgccctgaagaaagtcgccgccaccttcgacgcggcaatgtcccgcgccctgtccggtttcaaggacgccgcccaccccggcaatttcaaggtgctggcggtgaccgacaaccctgccctcgcctccagcaaggccgacggctaccgcatcgcccaggccggtgacaccgcaccgggcctggacacctacaaagccatcggcccggccgatgaagtcggtccagggatgattcgctacgaaaccctatcgggcgataaggtggtcgtgagtaaggaaaccaacagcgacctgtacgaaaaagtgaagtccgatggcgagacctggggcctgatcaacgacagcaaaaacgcaggctaccacctggccggggccgatgaagccggcagcgtgagcctggtgggcacgccggaagaactcggccacgggctgatccgctacgaaaccgcgtccggtgacaagatcatcgtgtcccaggctatcagtcccgacctgtacgcctcggtggtcaaggaatccaacggcatttttggcgtcggcggcgccgtggacaccaattggatcgacaactccaaatacgccagcgccaaggactgggacaagattgtcggcaacaccagcggcacgccgacccaggaagagcgcgacctcgatcgcccgcgcgccgcctcgaaaatgctcagcgacaactgggacaaatggggcctgcacgaccgccccatcgacttctccaacccgcccgccgacctgccgcccgaagcccaggcctgcctcaaatacctggccggcagcccgagcctgatgaacgccctggacagcggcggcctgggcaaaagcgacggggtgattacccgcgccgatgtggataagttcatcagccaatccaacaaggatctgtcagctgcctcgaagtcgtacagcaccttcctcagcaagaacccggacgcgacgagcctggccaagcaaaacgccaagtccgccgccatcgtcatggctaacatctccctggtgagcagcgccggaccggagatgcagggccccaaccagcgcgccaacaacggcagcctgaacaccgccaacctcaaggcgatcaaggatgactcaggcctgagccccgagctgaccggtgccgcgggctactggtcgacaccgggcatgctgcgcaccctcgacatggccggcgacctgcccgccaccgcgaaggctgacggcatcacccaacagaaaaacatcggcgcctggctggaaaaccaggcgcccaaggacgaccacggcgtgttgatgatgctcagcaacgcctcggtgcgcagctcggtggccgacgtcgacacctccaagctgaccaaggacgtgctcgaacacccggaaaactacgacggcaaaaccaaagccgcggtgatgatggaaatcagtgacgcccgcgcccgcatggccgccagtgacaaagtgggcgacggcgacctgtacgccgggatcaccgccgatacccaataccacctcaacccgaccaaatccaaggtcaccgaccagctcgacgccgccgtcgccaagctttccagtgacccggacgtgaagaccttcctctcgcagaaccaggcctccggcatgcgcgatatcgtcaacagcgacccggcgatcaagcaccaactgcaggcctaccaggacggccagatcaacagcggcaatgtgctcaacaccgccctggccaccaaaggggctgatggcaaaccgctgtcgttgatcgacgctctgagcctggccggcaccgacgccaccctcaccgacctggccctgggtggcgacggccatgtggacctcagcgtcattgccgaaaaatccggcaagtccggggacatcgagcaattcttcaaagaccacatcctcaacggcaaagacctgcaagacgccctcgcccagccgaacgccgacccgatgaccgccatcggccaatacgcggccaaggcggagttgctcaaggagttcctcggcgacaaggtctcggcccaggattcgtcgacggtgcagcaatacgtcaaccaggcggtgtccgactccctggtcaacggcgccaacgacgacgtgctcaaaggcgcgttcggcgatgccaatggcaattttgacgaggccaagaccacggccatcatcgacaaagccatggccgacgacccggacctgttcaaggatgccagcggtgtgcagatcaagccgcaggacgtgatctcgttgatccgctcaatgtgggacgtgaaccgccagggccagaagatcagcgacgtgctgcccaaggccgtcgatgggctgaagctcaacgccagtgacgcctataaacagggcctgctgcatatcggcagtgcgctgctggccggcggcgtactggcggcgcgctcggccaccggcggcaacagcccggcggacaacgccgggcgcgtggcggcgggcatgcagttcgccgggctgatcaccgaaggcggcaccaagtacgccaaggaggccggctacggcatgacctggaaacccacgccgattgacccgaacaaaccccagggcatcggcgacttccccaccggcaaaatggtgcagaacaccgacggcctcaaccgcctgggcaacctgggcaagatcgtcggcggcaccggcagcttcatcggcggcgtgttcggcctgatcagcggggtcaacagcgcgtttgccggcgacaacgtcaacgccggtttctccctcaccagcggcgccctgggcaccggcgcggcggtggcctcgattattgaaggcggcgccggcctgttcggcgtggcggatgcggcggcgattgccggcaccttcgccggtgtactcggctgggctgcggcaggcgtgggcatcgtgacgtcgtttgtgttcccgatcatcgaggtggtgaagcgggaaaaacagcaggacgcgttctttggcaacctggtgccgaccctggataaatatggcctcactggcggcccgatcaccgacgccgaccgcaaggatgagtacccgccttacgccaataccggttttgcctgacccatatgagcccgctcgccactacagattttctcccccccgtaatggcgcggcattgcttacaatggccaccctttcgttttcaccaggcttgacgatgtccgctactgctccttcccacgttgccatcatcggcggcggccctaccgggctgatggccgctgaagtcctgagccaggcaggcgtgcgggtggacctgtacgacggcatgccgtccgtggggcgcaagttcctgctggccggcgtgggtggcatgaacatcacccattccgaagcgtacccggcgtttctttcgcgctatgccgaacgtgcgccgcacatggcgccactgctgcgtggttttggtgccgaggcgttgtgcgagtggattcatggcttgggcatcgagacctttgtcggcacctcaggccgggtgtttcctacggatatgaaagccgcaccgcttttacgtgcctggctcaagcgcctgcgcgatcagggcgtggttatccacacccggcatcgttggctgggctggaatgccgagggcggcttacttatccacaaccccgaaggcgaaaaaactgtccacagcgacgccgtgctgctggccctcggcggcggcagttggtcgcgcctgggctccgacggtgcatggctcaagttgctggaggatcgcggcgtgccctgcaccgcgttgcaaccgagcaactgcggtttcgaggtgtcggcctggagcgaattgatggtcagcaaattcgccggcgcaccgttgaaaaacgtcgccatcgggctgggggatgacaagcctcggctgggcgaatgtgtggtcaccgccaccggaatcgaaggcagcctgatctatgcgctgtcagcgccaatccgcgaagcgatcaacagagacggctcggccaccgtgcacatcgacctgctgccgagcaagccgctggacaaggtccaggctgcgctggccaaaccccgtggctcacgctcaatgagcaaacacctgcacagtcagttggggttggatggggtgaaggcagcgctgctgcgggagttgacaccggccgaccacttcaatgatccggcgcagttggcggtggcgatcaaggcgctgcccttgaccctggtgaagacccggccgatggatgaagcgatcagcaccgcaggcggcgtgccgttcgaggcgctggatgagcggctgatgctcaagcagttgccaggcgtgttttgtgcgggggagatgctggactgggaggcgccgaccggcgggtatttgctgacggggtgttttgccagcggccgggcggctgggcgggggatgttggagtggcttaatcgctgagatttgcgctgaattcaaggccgccatcgggggcaagcccctcccacatttgactgtattcacacatcaaagtgtgggagggggcttgcccccgatgaggccatcagcagcgccaaaaaatcatttcttcttgcgcggcccggtattgaaaacaggcaccttgcgcaccggcttgatcgacggctccaccggcgccgcttcgccgctgtccacccacttgcccaggttgcgcttaccgccaccacccgacgttttaggtttcttcggctttttcggcttcttcaccacctgcccgctggcatcggtgtccggcacgcggtgttccggctcgaagtccggctccatcttgcgggtcaaggtctgacgcgtgagcatctcgatggccgacagcatgttcacttcatcggcacacaccagggaaatcgcctcaccggtgttgcccgcacgcccggtacggccaatacggtggatgtagtcttcagccacgatcggcaaatcgaagttgaccaccagcggcaagtcttcgatgtccaggccacgggccgccacgtcggtggcgaccaggatctgcacgtcactcgacttgaaacggtccagcgcacgttggcgggtggcttgcggcttgtcaccatggatgccgtcggcgttgatgcccaggccctgcaacttatccaccagcgcatccacgccgttacgggtcttggcgaacaccagcacctgcttccagcgacctttgcgcatcaagtgcacaaacagctccggcttgcgcttcttgtccaccggcaccacccactgcttcacggtgttggcagcaacgttgcgcgggctgacctcgatgctcagcggatcgttgagcatctgcccagccagcaggcggatgtcatcggagaaagtcgcggagaacagcaaggtctgacgctttttcggcagcatgcggtagatgttcgccagctcttcggagaagcccaggtcgagcatgcggtcggcttcgtcgagcaccagggtttgcagctggttgagtttcagcgcgttctggcggaacaggtcgatcaggcggcccggcgtggcgaccaggatgtcgacgcccttgcgcagcttcatcatctgcgggttgatgctcacgccgccgtacaccgcgtaggtggtgagcggcaggtgttgggcgtactcggcaacgctggcgtgaacctgctcggccagctcgcgggtcgggcacaggatcagcgcccgtgccgagttggcggcgactttcggcccttccatcgtcagcagttgcaggagcggcagggcgaaaccggcggtcttgccggtgccggtctgggctgcggccatcaggtcgcgaccggccagcaccgccggaatggcttgcgcctgcaccggcgtcggggtctggtagccaagcgtctcaagggcgcgcagcaagggttcgatcaggccaagggtggcgaaagtcatgtgtttaccgtaggaaaaattcagcgcaaggtcgcaatgcgccgcagtttaccttatttccggcttgggcttgcgccactggggcaggctgatcaacagcaccgcgctgataatcaccagcatcgccagggcttcttcgacgccgatggtctcacccacgaacacaatccccagcaataccgccaccgccgggttgacgtaggcatagctggtcgccgccgccgggcgcacgtgcttgagcaggtacatgtaggcgttgaaggcgatgatcgaaccgaataccgccaggtaagccagggccagccagccctcgatcggtggcaccgcgtgcaaccgctcaccggtcagcgcactgcccaccaacagcagcgcaccggcaatgatcatttccgccgcgctggccatcgcgcccgccggcaacggcaagtgcctgctccacaccgaaccgaaggcccacgacgcggcggcaaacagcaacaacatcgcgccggtcgggcttgattgcaggttggagcccatgttgagcatggcaatgccgataatccccagcaccaccccggcccactccaggcgggtattgcgcgcgccccagaaatagccgcacaacaaggtgaacaatggcaccgtcgccaccgccaacgccgctacgccggacgcgacaccggtgtgttcggccaccgtcaccgcgccattgccgaaggtcagcagcagaacgccaatcttcgccgcagccttccactgcacccaggtcggcgccggcgccccgcgccagcgcaaaaaaccatacatcgccaaaccggccaccagaaagcgaatcccgcccagcatcaacggcggccagtactccacgccaatgcggatcaccaggtaggtagagccccaaatcacatacagcgcaaaaaaggcagcgatcaacggtaagggaaagcgacgtgggccaggcattgggcagctctaaggcagagagaagagaggcttattctaaaaaggcaggtcgttaaacataagttacaaaacctgtttaaaacgccgttacacttttcaaagcatggttgtgaaggctataaaccgtgctttcgaaagccacgcacaactggagccttatcatggacaaatacgaccgcatgctcctcagcgcactgctcaaagacggccgtgcgtcctacgcgcaactggcccgcacggtaaacctctccgcccctgccgtggccgagcgcgtggccaaattggaggccagcggggtgatcaccgggtatcaggccaaggtggatttatccaaggtggggttgccgatccagtgcgtgattgaactgcggctgaccaatcatggcagtcagaaggtgtacgacgcgctggcggaaattccagagctgaccgaatgccatcgggtgaccggcgacccgtgcgtgatcatgcaggcggcggtggggtcgatgccggagttggagaatttgatcaaccggatcgcgaagttcgggttcagcaagacctcgattattttgtcgagtgcgatagagcggcgggtgccgttggggcagttggaggggaatgggaaaaatggtggttgaaccgcaaagtcgacaatctgaatgaagcggaaaaacagaagggtcctaggcagcgataggattctgcctactgaccattcagaaacctgccttcaaaagccaagttttcaatggccagcaagacctatctctttcatttgaaggatgtttccgagagaatcctggagccttgcgtcagccggatccggtagctagtctcgccccgtcatcgaaaaaatcggtgatcggacgtgcaagtccagctcgcaaaggtgcacaaacgccctacatctcaacgtgcggttttaatgaccgacgtttatctgttatggcggctgtgcgctggagaccttcggggtctgccgggttctcctttgccccggtcttgcacacctgcgtacagctgccaccctctttcgcgtgcaagcgaacggtgatggcttcttaattcagaggagttacaccatggtcaaagtaacccccgatccaccccgtttcctcagcgaagacgccctgctcaaccgccgagccatcgactattacctaaaagcctgcgccccggatgcgcccgccttcaccctgaacgacaacctgagtttcgaagacgccctcgcccatgcggccgatttgctgcattgcgcggtggagacagcgcattcatcgaatgaggcgatgaaggcgcaacagcgggccgtgatgcatttggtggagatggcgaagggggtggtggatcgggcgttggcctgtgtgcagcctcgctaaacaccgcagaacccatgtgggagggggcttgcccccgatggcagtgtgtcagccaatacatctgtagctgacaggccgctatcgggggcaagccccctcccacatgttgagtttcacattcagagctcagtattttggggcgtgtggcgaggtcagaacccgcgatgcttcttcaggtgctcattgatcttcgccgccggcactttctgcaaggtgcacagcaggtcgtgggacagttcgcgcaagccgtgggtacggcgcagttcctgggccaggtgcgccgtgaggttggccgccatctccgcatccgccagcgcccggtgggccttgccggtgtggggcagctgagcgaaggcgttcaacgtgccgagcttgtgattgggcgcagacggcatcaggcgacgcgccagcaacagcgagcaggcaaatttctgtaaccgggtgcggcggatcaagcccaattcataatcccagaacttctggtcgaacgcagcgttatgcgccatcagcggcgtagtaccgacgaactcattgacctcgttcatcacccgctccgccggcggcgcgctgcgcagcatggcgttgctgatgccggtgagttgttcgataaaacccggaacgcgtacaccggcattcatcaggctctggtagcggtccacgatctggccacgctcaaggatgaccaccgcgatttccgtggcccggcagtggctgctcggggtgatgccggtggtttcaaagtcgatgaccgctatacgttccaaacctgttccaactccgtaaaagatctatttgagcaacaacgcgccttcaatcggcacgtagcggctggcggcgcgaatcagcgaattggccgtcagccccggcacgccataggccacggcttcaacaccatgcttgtggataacccggtctaggagcatgtcgaagtccccgtcgccggaggccagcacgatttcgtcaacgtggtcggcggcgtccatgatgtcgagggtgatgcccacgtcccagtcgcccttggccgagccgtcgctgcgctggatgtatggcttgagttttaccgtaaagccgaggttgcgcaggatttgctggaactgctgctgcttgctgtcgccacggtcgatggcatacgcgtacgcctcgacaatctgcccgcgcgcgctgatgtcagcccacaaagccgcatagttgaagtggcaaccataggcctggcggacggtgtagtagaggttttgtacatcggcgaacactgcaattttcttcaccgcacttcctcatgacagccaggcgccagggcccggaaaggctgcaagtatgccagtcgcgacgaggttgtcgggaaaaatcagaccggggcgacgcagcgccccgggccgaggtgggtcagacgaaggaatcgtcgtcgccgaaagaagacgaatcgtcggaatagtcgctgtcagcgaagctgtccgaattgttgctgccccagctgtcgttgccggcgtacttctggtcatcattgccccagttgccgttgtcactggcaggcgctggctcctcacgaatgatttcttccacgacttgcggctgttgcgaattgtggttgaacaggctgctgatgccttcggccagcaatacaccaccggccacgccggctgcggttttcatcgcgccgccgaggaagccgctgcccaccggagcggctggagcaggctgttgataattctgctgcggggcaggttggctgaacccaggccgcgccggttcgcgccagccgccaccagaagaaggcggtgcactttgagccggctgctgatcacgggaaccaccgccgccaaagatgctcgacaggaaaccgccgctgctcgccggagcaggctgcgcggatttggccctctgcagttcatcctgcaattgctggatctgctgcgcctgctgcttgttctgcgcgtcgaggctcttgagcgcatgttcctgcaccaggatcgactgggtcatgtagtacccggccgctggttggcgcgtcatgtgctccttgatccgcgcttcggcctgggcgtcgcggggggctgagtccgtttcggcttgttgcaaccgtgaaaacagtccatcgatcagggtttgctcttcgctgttcatggcgacctcgttagattgccggtagaaatcgtggtgtcgcctgtgatcaggcgccgtgctagttatgggggtgttacgagttgtttcaatagtctttactcaaggtttacgtttgcttaccgccggtgatgatcggttaaagtgttgcccttgctttcaggcctgcgatgaacttgatgaatccgttagacgtgctgcgcgactccttccgtttcacccaacgcaacctgggcgctatcgtccagttgtgcttgccgttggtgattttcgaagccctgctgcaacaggtgctgaatcacgtggtaggcgaggatgcattccccggctacagcgtggtggtggggttgctggtgtacccgctgtacaccggggccttgatcctgtttctggatgcccgcacccgtggcgagtcgccgcgcaccaaggatgtatgggccatggccctgactctgtggccgcgctttgccctgctgacagccatgagcacactgctgattctgctggggctgtcgctgtatttcctgccggggctgtggctgatggtggtgctggcctttgccgagtacctgctggtgctgcgcggcatgccggcgttggaggcgatgaaggaaagtttccgcctgagccgtgggcatttctggcggatcctggtgtgcctgctgtgtgtgatgacgccgttgtggctgctcaagggcgccagcgtagcggcctaccccgagcccgcgccgctgctgggcctgttactggacagcgcccacagcttcctgcagttgtttaccagcgtggtgctgttccgtttattcatgctgatcggtggcgatgccgacgcgcggtgatatgctccgtgtcacctctgaaacgctataagccgagccgatgacccgtttattgcgcatcaccttgctgagcctgctgatcatcgcggggttgtttgcagccatggtctacagcctgacctggcgccccgagcccaaggaaaccctgccggtgagttgcgttgcgccgcgtgcgcccacgctgctgccggggcaggcgctcaaggtcatgacctggaacgtgcaatacctggccggcaagaactacgtgttctggtacgacacggtcgatggcagcggcccggatgatcggcctaccgtggaagacatggccgccagccttgacgaagtggcgcgggtgatccgcgacgaacaacccgacatcctgctcttgcaggagctcgacgaaaacgccaagccttcccactatcaggaccaactggccctgctgcaagaacgcctggtcgacctgtacccatgcagcgcccaggccttcgactggaaagccgacttcgtgcccgattggcatatcttcggcagcgtcggccgaaagctcgcgacactcagccgctatcagatcgaacacgccgaacgcctgcaattgccggcacccgaggccaacatcctcagccgccagttccagcccaagccggccttgctgctgacttacctgcccctgagcgacggcggccaactggcggtgctcaacacgcgcctggacggtgacgccccagggcgcagcgcggtgctggagcaggtacaaaccacggtcaagctgctggataaattcgaaggccgtggcacgccctggctgatcggcggggatttcaacctgctgcccctgggccagttcctgcgcctggacgccaccaaacgcgggcagtattcgccagacagcgagctgcacctgctgtgggacaaatacccgatgatcccgagcaacagtcaatccagcgggattgaccgtgaaaagtggctgacccacttccccaacgacccgagtgtggacgggccggatcgcacgctggattacctgttctacagcccgcggatcaagcgggtcgaggcgaaggttcgccaggaagacaccttgcgcatctccaaccacctgccggtgatcgcccggttcctgctaccccccgcgccataaccaacaccgtaaaacccatgtgggagggggcttgcccccgatggcagtgtgtcagccaatacctctctcgctgccagaccgctatcgggggcaagccccctcccacatttggaccctgtggtgttacgacttgcgaggttttatccgtgccgtcgcctcggccaccaacggatcatccggccagtaatgcttggggtagcgccccttcagatccttcttcacctcggcgtaggtactgcgccaaaagttcgccagatcctgcgtgacctgcaccggccgccgcgccggggacagcaggtgcagtttcaccacctggcgcccaccagcaatgcgcggggtgtcggccagcccgaacaattcctgcaagcgcaccgccaggatcggcggctgttcgctgtagtccagccgcaccgacgagcccgacggcactttcacatgctgtggcgccagttcatcgaggcgctggggcagcggccacggcagcaggttgtgcaggaagctggagatatccaggttggcgaaatggctcaggcgcgagactttgcccaggtagggcatcagccaatcttcaagattggcgagcaaagccttgtcgctgatatccggccactcgctggctttaccggcgtcaaggtgacgcagcagcatcacgcgggcctgccattggcgcagctccggcgtccacggcagcagctccagacctttgcgacgcaccaggttgaccagcgcctggctgcgtgcggactcgtcgaggccggtgagcggttcgcggctgagcaccagttcaccgactttgcgttggcgttcggcgcgcagcacgccttcgcgctcgtcccagtcaagctgatcgacgttgcgcacttgttcggcaagcaccgtgtcgaacagcgccggatcgaaatccgccgccaggtaaatgcgttcttcacgctggccctggcggctgcccaggtcggcgatgaccagccagggttgcttcatcaggctgtcggcctcggcgaacagcgccgcgcggccgttggccaggcggtattcggcgccgcctgggcgacgttgctgggcgacgcggtccgggtaggccagcgccaacagagcgccgagccaacgcggatgatcgggatccgccacgggttgcgtggcctggcctctcaagtagccgcgatattgtcgggccaattgtttggcccgttgcacgccgccttgagtaccgcgcgcgcgttcttcaccggacagcagcgccaggcgactgtgcaaatccgcaccgccgccgcgcaggatgtcgcgctcgcccaacagcgcggcgacatcgcacgcggtgctcgccagccccaggtcctgcccgcgcaacagcagatgggcgatacgcgggtgggccggtaactcggccattttctggccgtgggcggtgagtgtgtcgtcattcaacgcgccgaggcgcacgagcaaatcctgggcctgggcatacgcggcggtaggcggcacgtccagccacaccagttgcgtgggcgtgacgccccagcgtgccaactgcagggccaggccagccaggtcggcggcgaggatttccgcgctgccataggcggccaggccttcatgctggtcctcggaccataggcgataacacacgcccggctccaggcgccctgcccgaccggcacgttgcgtggcgctggcgcgggagatgcgttgggtgtcgaggcgggtcatgccgctgccggggtcgaaacgcggtacgcgtgccagcccggcatcgatcaccacgcgcacgccgttgatggtgaggctggtctcggcaatattggtcgccagcaccactttgcgcttaccggcgggcgccgggtcgatggcggcgcgttgggcattgaggtccagttcgccatgcagcgggcacaacagcacatcgctgcgctcgcccaaggcgtccgccaactgctggttgacccggcgaatctccgcctgccccggcaagaacaccagcacgctgccggtttcgtcgtgcagggcttcgaggatggtttgcaccacgcgtggttcgatgaattcaccgggctgataagggcggccccagcgcatctgcaccgggaacatgcggccttcactgcgcaggatcggcgcgtcgtccagcaggctggcgaggcgctccccttccagagtggcggacatcagcagaattttcagcggttgctcgtcgcgaaacagctcgcggccgttgaggctcagggccagtgccaggtcggcgtcgaggctgcgctcgtggaattcgtcaaagatcaacagccccacgccctccagcgcagggtcgtcttgcaggcgacgggtgaggatgccttcggtgaccacttcgatgcgggtgttggggccgactttactgtccaggcgaatgcgatagccgaccgtttcgccaactttttcacccaactcgctggccaggcgttcggccgccgcacgggcggccaggcggcgaggttcgagcatcaggatggtctgcccggccagccagggctcgctcaataacgccaaaggcacgcgggtggttttaccggcgccgggcggcgcttccagcacggcttcatggcgattcgccaaggcgtcacgcagggcgggtaaaacttcatcaatcggcaacgaattcatactggctccaaagcagagcggcgagtataacggcgaactgccgagtgccgacgatggtctcagaaacgccacccacttcaattgcgaatgcaatcaaaggtgggagctggcttgcctgcgattgcggcgtgtcagccaatgcacttctgactgaaccaccgctttcgcaggcaagccagctcccacattggaacggcgtcgttcagccgatctagcttatagtcctctttaaatcgtgttcaggagaatgttatgcgtatcgcttcccgtgtcatcggcggtgtcctcgccgtcaccctgctgagccaattgacggcctgcggttcgatcttctacccggaccgccgtggccaaatcgatggcaagatcgacccgaccatcgccgtgctcgacgccgtgggcctgctgttctatgtgatccccggcctgatcgcgttcggtgtggacttcgccaccggcgccatctatttcgaaccgggcaagaccgcccaggtcgacccggccaaactccacgacgccatcggcgccgacggtaaggtcgacaacgccaagctgcaaagcatcatccagaaggaaaccggccgccgcctgccgctggacgacccgcgcatgatccagttcaagggcagtgtgcagcaactggcgtccctgggcctgcaacccgctgcctaaggaccgtccatgaccagcagtcccgaacacgccaggctcttgcgcctggccacccgcgcttcggtgggcgtggcctgcgcgctgattatcaccaaggccatcgcatggtggctcagcggctcggtgagcatgctcgccggattgaccgactcgctgttggacggcgtgacctcgctgttgaatttgctcgcggtgcactacgccttgcgcccggccgatgacgatcaccgctatgggcatggcaaggcggagtcgctgtccggcatggcccaggcgctgtttatcggcggcagcgcggtgctgatcgcattccaggcctaccagcgcctgcaacacccggagccggtcggcgcaccgtggctgagcattggcgtgattgtgttttccctggtgctgaccgtggcgttgttgatgctgcaacaccgggtgatccgcgaaaccggctccaacgccgtgcgcgccgattcgctgcactatcgctcggacctgatgctcaacggcagcatcctggtggcgctggtgctggcggggtttggctaccaccaagtggacgcctggttcggcctgggcattgccgcctacatcttgtggagcgcgatccagatcgcccgggaaagctttgcggtattgatggacgaggagctgccgccggaggtcagccagcacatgctggaactggcccgtggcgtgccgggcgtgttgggcgcgcatgatttgcgcacgcgcatttccggcagtcactggtttgtgcaactgcacctggagctgccgggggaattgacgctgtcagtggcccacggcatcagcgaccaggccgccgacgccattcacaaagcctacccgcgtgccgaagtgctggtgcacgccgacccacgggaagtggtcacgggcaataagccctagtactgcacctgatagccgcgactgctcaggcagttgccctgggcctggcggtaggtttgcaccaccgccgggtcaggcgcgtaggtgacttgctgcgggtcgaaaccgctttgctgcactgcccagcgatagcagtcataaccgtcctgctgcacctgggccggcgactgcccgttggcgggatacgccaccacgtcatagccattgccttgcggcgcgggcggcggcgctggcacctgcgtcggtggttgcaccaccacgtactgttgggagctgctttcgtaggtgtaatacgcaccggccgcgaggaagaacagcgtgctgcccacccacacttcgcgcgcgtagtccggcaggtaatgcacgcggatgccgtagggtggcgtcaccactacataacgcgggccttgcgggcgataccaatagccgccggagtagaagtaatcctggcctcggtaaggcacgcggtagttgcggtcggggaagcggtcgatcacgtagcccgggcgatgttgcgggcctgggccccagccattgccatgcccatcggggcgacctggccagcggttgtcgccggggcgcgagcctgggccgccggcttcccagtgtgggttgccgtcattgcggcgcgggatgtcgcggtagtagccctggcgcggttcctgggtctggcgcacggtgtcggggcgactctggatcggcaggttgttcgatggctgtggttgaggctgcggccgcccttgctcattaccttgggggcgcccttgccattggccaccaccgttttggccaccacgatcaaaatgctgattctgcgggcgtggctgattgttttccggccgaggctgattgttctgtgggcgcggctgctcattcccccccccaggtcgcccaccctccggccctctttcatgctggccgccgccatcaccgcgcggcccgttgtcacgctcgtcggctactgcctgggcgccaacggtgaccatcagcaaacctacacctgccatacgccagatgcgcttcatgctattcctcactgcggattagggcctgtccatgagactggaaaagccaggcccggttcgcggacaggttatcagcaggcaaaagaaaaggggtgacccgtcggccaccccttgagaacttcgtcctggctcaacgcttttggcgttggctcacctcacgccgtcttgtggacagtgtgcagcctggaggccggctcaaccctgctggggtggcggccgcagctggcctgattgggcgggctgctgtggactgttgtccaggcggtgattctgttgataaagatacccgtaggcgcccgacagatgattgcgaagattgcgtcaataaacagtgcttgcgcaatttttaacccttcatagataattcaccgcaatagttacgacaaaggccaacccaatgagcaagcttgaccgatacgacctgagtattttggcggaattgcagcgcgacgctaggatctccaaccaggagttggccgaacgcatcggcttgtcgccgtcgccttgctcgcgccgggtcaagcagttggaggacgacggctacatcgcccgccaggtcgccctgctcgaccgcaagatgctcggcctgagcctgaccgcctacgtgctgatcggcatggaccgccacacccccgagcgtttcgagaacttcgaggcggcgatccgcaccctgccccaggtgctggagtgcagtctggtgacaggcatggatgcggactatcagttgaaggtggtggtgccggacatggatcactatcagaaactgctgctggggcatttgacccgcatcgaaggtgtgaccagtgtgcggtcgagctttgtgctcaatcaggtattgaacagcaccgaactgccactgacgcacctgcgaacctgagatcaatataaatcaactgtgggagggggcttgcccccgatggctgagtgtcagtcagcctatatatgactgacccagcgtcatcgggggcaagccccctcccacatttggattgcgcttcgactcaggtcaatgttgcgtctgtaacactgccttatacttcccgcctgctcctgtcggaaaaacaccatgaacaacatcgaccccgccctcttcgaagaatggatgatgaccggcctggtcacgatcctgatcattttcatgggctttatcgtctgggacctggcgaagaagtccaaggccgggcgctttggctcgttcattctgttcttcgtgctgggcctgggcgtggccgcgttcatcatcaagagcgtggtgatcggcctgatcgagtccggcgccttataagcgcgctggtacttccttccactggccttggtccaggccgtcgatcgaccaatcgccaatccgcacgcgcaccaggcgcaaggtaggcaaaccgacagcagcggtcatgcgccgtacctggcggttgcgcccctcacgaatgatcagttccagccagtgcgtcgggacgcttttgcgaaagcgcacgggcgggttgcgcggccacagttcaggttcatccaactgtcgggcctcggcgggcaaggtcatgccgtcgttcagttcgacgcctttgcgcaggcgttgcaactgttcctcggtgggttcgccttccacctgcacccagtaggttttcgccagcttatgcttggggtcggcgatacgcgcctgtaattggccatcgttggtcagcagcaacaggccttcgctgtcacgatccaaacggcccgccgggtatatgccggggatatcgatgaaatccttgagggtcgcgcgcccgccttcgtcgctgaactgggtcagcacatcgaacggtttattgaacaggatcaacttcggctcggccggaggcgccttggcgacacgccgcgcagcggaatacggggttttcacgccagggcggcgcgaatcgggacgggtgggacgggacatggcaaaggaacatctaacggtcaggaccgacaatgctagtggcctgaccgttaaatgaccatcccaaccgcttagcggaacggcggctcgtcgaagctgcgcagtttgcgcgagtgcagcgagttgagttcggtgcgcagcaggtccaccgcctcgataccgatcttcaagtgctggctgaccgcacgctcatagaacgcgttggccgaacccggcagcttgatttcgctgtgcagcggtttgtccgatacacacaacaaggtgccgtacggcacccgcaaacgatagccttgcgcggcgatggtgccgctctccatgtccacggccacggcgcgggacaggttgatcagtgggcgttcctgggcccagcgcagttcccagttacggtcgtcgtaggtcaacacggtgccggtacgcaggcgttttttcagctcttcgcctttttcgccggtaacgttggcggccgcttgctgcaacgcaagctgcacttcagccagcgccgggatcgggatgttcggcggcaccacgcggtcgagaataccgtcgcggcgcatgtaggcgtgcgccagtacgtagtcgccgatggtctgggattggcgcaggccgccacagtggccgatcatcagccagcaatgtggacgcagtacggccaggtggtcggtgatgttcttggcgttggacgggccgacgccgatgtttaccagggtcacgccgtggccatcggtggcctgcaggtggtaggccggcatctggtaacggtgccacaccacaccggcggcaattgccgacgcctcaccgtgatccatgctcttgtcgatcaccacgttgcccggcagcaccatgcggataaagcgcgggtcgctgcgcagttgctccaggccatgcaggatgaactggtcgacataccggtggtagttggtcagcaggatccacggctgcacatggcgccagtcgctaccggtgtagtgcaccaggcggcgcagggagaagtccacgcgggccgcatcgaacagcgccaggggcagcgggtcggtgttttcccaatcgtacaagccatcggcgatgccatcggtggcggccgacaggtcggtgctcgggaatacgcgagccaaggtcgcagcggtaacgccggagccggccagttcatcgccctgctccaccacgtaggggtacgggatgttctgctggctcacgccgacttccacggtcacggtgaagtcgtgcatcagcggcaccagttgctccagcaggtatttacggaacgctgcaggatgggtgacggtgacactgtaggttcctggtagttgaaccttggcatacgcccgggtggtctgtgggacttcgccgtggcagtggtaagtcaggcgcagttccgggtagcgaaacagcgcacgttgtgcggcgtcgggctcgacgcggtctttgaggtattgcttgagggcttgattgagcgcgccagtggcacgctcatgcagggccgccagccggtccacggcttcttcagcggtttgaacgacaacaaaagcttcggtcacggtaagcatcctgtgttctgacttgcaggcctttatcttgcctgtatcccggcctcaccgaaacaccagagttggaatgcggtaaatgtgggagggggcttgcccccgatagctgactgtcagccaacacatctatcgctgacacaccgctatcgggggcaagccccctcccacatgtttaccgcattttagtccgatagattgggggtggaacgggtgacgagcgccgccacatccacaccacgaggcaaggtgccatagacccgagcggacgtttcgcccaaccgactggcgataaacccatcactgaccgccgcattccccgcctccagcaacaacttggcctgcaatgccacggcgatgtcttcggtgagttgccgcgcacggtactggatgtcctgggtgtccatgaacgccgacttgagctgttcgatatgccgcacaagcaacttgtcgccatgcccatcgcccagttcgacaaacagcgcctccagcacacccggctctttcgacaacgcccgcagcacgtccaggcactgcacgttaccggacccttcccacgtcgagttcaccggtgcctcacggtacagacgcggcaaaatgctgtcttcgacatagccggcgccgcccatgcattcagcggcctcgttgatcatcgccggcgcacgtttgcagatccaatacttgcccaccgccgtcaccagccgggcgaacttggcttcctgttcatcgtccagatgatccagcgcacggcccatgcgcaggctcagggccagtgcggattcgctttccagcgccaggtccgccagcacgttctgcatcaacggctgctcgctgagcacgcggccgccgaccgaacgatgggcacaatgatggctggcctgggtcagcgcctggcgcatcagggcgctggagccgaccatgcaatcgaagcgagtcatggcgaccatctcgatgatggtcggcacgccacggccttcttcgccgatcatccaggccagggcaccacggaattccacttcgctggaggcgttggagcagttgccgagtttgtttttcaggcgctggatgtagaactcgttgcgcgtgtcatccggacggtgccggggcagcaggaagcaggtgaggcccttgtcggtttgcgccagagtcaagaacgcatcacacatcggtgccgagcagaaccacttgtggcccaccagttcataggcctgccctggcccgcccgctcccaccggatacgcccgggtggtattggcacgcacatcggtaccaccctgcttctcggtcatggccatgccgatggtggcaccggccttgtgggcgatgccaacgttgcgcgaatcgtattgggtattgaggactttcggcagccagatgtcagccaagtcaggctgcagacgtagcgcaggcacacaggcgaaagtcatggtcagcggacagccggtgccggcttcggcctggctgtgcaggtaggtcatggcggcgcgggccacgtgggcgccggactgcggatgggcccaaggcagcgacggcaggccgtgttcgacagcggtacgcatcagttcgtgataagccgggtgaaactccacgaggtcgatgcgatggccataccggtcatggctgctgaacaccggtttgttctggttcgccaggaacccggcttccatcaatggcccgccggccaacgcaccgtaggcatcgatacgcgcttttgcccagccggcaccaaagcggcgcgaccattcctgcaaaggcaagtcgatacggtacaggttggtgccgtccagggacggcggctggttggtgacgtcgtgggtttcggcaaattgatgcaggttcatgacgggcctccaagaaaaaaggccacgttcagttgaggcctgcatttcagttaagcaccgtcataccccttaaaaaagtggcatacccgccgattgtccggcgcttttgccctctaaagggcgcaacaaccgacgctccaacaccgcctgcaatgcctcgaaacgcacaggcttggccaggcgctcggaaatcccgatgccatggcacccctcacgttccgacacattcagcgacgtgctcaaggcaatcactggtaattcgccacagcccggcagcgcacgaatctgacagcacaacgagaaaccaccctcgggaatatccaacagcactgcgtcgaaatccgccgcctgcaacgccgccaacgcgttcgggccgctgtccacggttttcacccggtaaccgagcttgagcagcatgccgcgcaccgccaactggccgacgctgttgtcatccaccagcagcaccgagcactcctggggcgcacgctgcttgtccggcgcaggcttggactcgggcgcgaccgggctgacctccacttccagctggaagcggctgcctttgcgcggctcggaatgatgggtaaggcgcccgcccagcagctcgatcagttgccggcagatggcaaggccgatgcccaggccgccgtattcacgggtggtggaaccatccagctggaagaagcgctgatacagggtggcttcatccaggaaagcaaagccgatcccggtatcggtgacgataaagctcaggcgcaagcgaccgtcgctgtggggcacgccgaccacacgcaggcgtaccgaaccttcgtgggtgaacttgaaggcgttatccagcaggcaatcgaggcactgcaacagtttgtcggcgtcgcccagcacacggtccggcagctcgtccgccacgtcgatggaaaacgccaggcccttgctctgggcgctggcgctgaactgctggcgcaaggtgtcgagggtaccgcgcaggctgaacacctcgggctgcgcaaccaggcgcccggcctgcaactcggtgagggtaaggataccgttgaccatgcgcatcatgtcccgcgccgagccggcggcggtttgctggtattgcgccaggtccgcatccagcggcacggtttgcatcagttcgagggagccgatcacgccgttcatcggggtgcgcagttcgtgggtcaaggtggcgaggaattcatccttgagtcggttgctgcgtgccaactgcaggttgagcacttcgagcttctggctggcgtcgaacaggatctgcgcctgttgctcacgcatggcattgatgcggtcggccagggccagggacaacagcgcgacttcgatcgccgaaccaatctggctggcgtacatggtcaggaacatattcggcaggtagcccagcaccatcagggtattgaccaccccgccgagcaggaacgccgaccaggcgatgatgaaatagcgcgccacccgctgcccgcaataccaggccttgatggccgcgacaaagatggtcacggtaaacaccagcgccaagccggtggccaggcgcagcgccagggcgtagctggtcatcaacgacagcagcatcaccacaccgccacacgccaccagcgccagcaacagacggttgatccagcgactgtgctgggccgtgtgcaggaagctgcgcgcaaacaggctgccgaacaacgctgccgagccaatcaggaacggcgtcgcggcattcgcccaccacgggttgtccggccagaagtactccactgccgcgccattgaccgacagctggtacatgccgaatgaagcgatatacaggatgtaatagaggtagctggtgtcgcgcacgctgagatagatgaacaggttgtacaccagcatgcccagcaacacgccatagatcaggcccaacacatacaggcgcagcggctgttgttccagatacgcggtgctggaccacagcgtcaaaggcgcctggatcgagccttcgctttgcaggcgcaggtagacggttttcgcttcgcccggcgtgaagtcgagtttgaacaggtagttgttctggcgaatctcacgggcggcaaacggcagcgcatcccctgtgcgcccggcgaggcgataggtgccggtgctgtcgggcaggtacaggtccagatggtcgaggggcgggtaggccagctccagcaaccaggtgcgttgggcttcaggattctggggcaggtagtgcagattgaccttgagccagaacaccgagcgcgaataaccagcattcagggtgtctttatcgtggggcttgaattgcgtgacagcggagggtgcgctgacatcggcgatggtgagggcatcggtcgggtcttcgagcacttgcagggctcgccccagcggcaggcttcgcgtgtcctggttgaactcgatggcgctggcgagcatcggcagcccgcacaacaataaaatcagcaaatagcgcatagagccccagcgtggcctgtccggttatgtcaaaaaagccccccattccttttgagaagacgtacaccggcaatacagttagtcgtttggatccactctagcatagccactaaaggctattagacaccattgaaataattttttgaaaggctctagaacggggctttcagcaattcgcatgcactcatttgggttgcagaaaccttccacccacggtgaaaatcctcctgtgcgcaacagccccgccaaaagcgtttggtggtaagctcgcgcaccatgaatatctacagctctcgccccgttgtcctctgtctctccggccatgatcccagtggtggcgccggcttgcaggcagatatcgaagccctgctcgcccagggttgccatgcggctccggccgtcaccgcgctgactgtgcagaacacggtcaacgtcagcgatttccgcgtgctcgaccgcgagtgggtgctggcccaggccaatgccgtgctcggcgactccgaagtggcggcggtcaagctcggcatgctcggctcgaccgcgatggtcgacaccgtggtcgaactgctgcaggcgcatccgcacctgccggtggtgtgcgacccggtgctgcgcgccggtggcggcggcagcctgggcaaggacgaggtcggttatgcgatgcgtgagcggctgttgccgttgtcgctgatcgccacgccgaacctgcccgaagcgcgcatcctcgccgaactgcccgaaggcaccgcagacgaatgcgccgagaagctgctgccctatataaagcacctgctgatcaccggtggacatggcgacgagcacgaagtacacaaccgcctctacagccgcgacggcacgcgccagacctttacctgccaacgcctgcccggcagttaccacggttcgggctgcacgctggccagtgccctggcaggtcggatcgcccagggcgaaggcctggtgagcgccgtgcagtctgccctcaactacacttggcgcaccctgcgtgacgctgaacaactcggccagggccagttcgtgccgcgccgtctgccgctggatttctgctcttaacagcacgaggcctgcctgatgaaactacgtggcctttacgccattaccgacagccaactgttggccggcaaattccttgcctacgtcgaagcggcgctggacggtggcgtgaccctgctgcaataccgcgacaaaagcagcgacgaagcccggcgcctgcgtgaagcagaaaagctgcgggagctgtgctcgcgctataagactcaactcattatcaacgacgacgccgaactggccgcgcgcctcggcgtcggcgtgcacctgggccagaccgacggcccgctgaccccggcccgcgccctgctcggttccaaggccatcatcggttctacctgccacagccagatcgaactggccgagcaggctgccaaggaaggtgcgagctacgtcgccttcggtcgcttcttcaattccagtaccaagcccggcgcccctgccgccaccgtcgaaatgctggcccaggcccgtgcgcgcctgcagctgccgatctgcgtgatcggcggcatcaccctggagaacgccgagcccctggtggcccacggtgccgatctgctggcggtggtgcacggcctgtttggcgccgacacaacccaggaagtcacgcgccgcgcccgtgcgttcaacgaccttcttagaatttcagtttagagagcccgatcatgtcccgttccgaaacgctgtttgccaatgcccagaaacacatccccggcggtgtgaactcccccgtgcgtgcgttcaagagcgtgggcggtacgccgctgttcttcaagcatgccgaaggcgcctacgtcaccgacgaagatgacaagcgctacgtggactacgtgggctcctggggccccatgatcctcggccacagccatccggacgtgctggatgcagtgcgcaagcaactggaacacggcctgtcctacggcgcaccgaccgccatggaaaccgagatggcggacctggtctgctcgatcgtgccgtcgatggaaatggtgcgcatggtcagctccggcaccgaagccaccatgagcgcgatccgcctggcccgtggtttcaccggccgcgacagcatcatcaagttcgaaggttgctaccacggccactccgacagcctgctggtcaaggccggctccggcctgctgacccagggcgtgccaagctcggccggcgtaccggctgcgttcgccaagcacaccctgaccctgccgttcaacgacatcgtcgccgtcgagcagatgcttaatgaagtaggccaggacgtggcgtgcatcatcgtcgagccggtggccggcaacatgaactgcgtgccgcccgcgccgggcttccttgaaggcctgcgcgagcagtgcgacaaacacggtgtggtgctgattttcgacgaagtgatgaccggtttccgcgtcgccctcggcggcgcccaggcgcactacggcgtcacgccagacctgagcaccttcggcaagatcatcggcggcggcatgccggtgggctgcttcggcggcaagcgcgagatcatgcagcacatcgcgccgctgggcccggtataccaggccggtaccttgtcgggtaacccgctggccatggccgccggcctgaccaccctgcgcctgatcagccgcccaggcttccatgccgagctgaccgactacaccacacgcctgctcgacggcctgcaacagcgcgccgatgccgctggcattccgtttgtcaccacccaggccggcggtatgttcggcctgtatttcagcggtgccgacgatatcgtcacctttgatgacgtgatgggcagcgacgccgatctgttcaagcgcttcttccacctgatgctggaaggcggcgtgtacctggcaccgagcgctttcgaagccggcttcacctcgattgcccatggcgaagccgagctgaaactgaccctcgacgccgctgaacgcgccttcgccgcactgaagtaataggctgcgaacatccggcaccgcgcaaacggtgtctgatttgctactttgcttacagatatttccgagtttttccgagaattcacctgcaatccggcagataacttgcccaagcagcagaaaaacgagtaaagactttgtaagcagaggcctgcttatttcataatgcgcgcttattggatcccccgagggtccgcgtgccccgtcagaggtaagtcgattcccatgaaacgcaccggccgcaccctggttctgggctgcctgttgctccttcagccgctgctggcacatgcacaagcaggcggcaactcgttgttaatcccagcgatgggtcgttgcaccctcaatacccagccagacagccaggccgaagctctgagcgcgtgccagaaacaggccgacggcggggatgcgcaggcgcaatacgagttgggcgagtacttccacgacagcaagaaccccgcccgcgacctcaacaaggccttgagttacttcgagaaagcttcgttgcagggccatgcccaggcgcaattccagttgggcaacatgttcttcaagggcgaaggcgtgccagccaataacgtccaggcgtacatcgtgctgaaaatggctgcggtcaacggcgctgaagacgcgctggacacggccgacgaagtagccgagcacatgcagcgcgatgaactggaagtggcgacccaggtgctgggccagattttccgcaactaccttctggaactgcagagcgccgatgggcgttcgcccttctcacccctgccctgacagccgccttacttctccggcataggcatcggaaatggcatcacattgctggtgccccgtgcctcgctgatcttcggcgtgcccaggcgctccacctcatcgatgcgcacaatcgaatgcatcggcacaaaactgcgcaccacgccttcgaactgtgccttgagcttctcttcgcccgggtcgacgaccaactgggtgcgctcgccaaagacgaactcttccacctccaggaaaccccacagatcgctctgatagatctgcttggcgtacatttcgaacacctggccctggttgaggaaaatcaccttgtagattggagcttcacgtttggtcatggtgggcgaacaacacatcggggatataaaagagggcgcgaactatagcatggcacccgatgcacaacgctaggaaccaatgggcatgccccctataatgcgcggttctttaccaccagttgacgattcccatggccaagaagctttacatcgaaacccacggttgccagatgaacgagtacgacagctcgcgcatggtcgatctgctgggcgaacaccaggccctggaagtcaccgcccgcgccgaagatgccgacgtgatcctgctcaatacctgctcgatccgcgagcgggcccaggaccgtgtgtactcgcagctgggccgctggcgcgaattgaaactggccaacccggacatggtgatcgccgtcggcggttgcgtggccagccaggaaggcgccgcgatccgcgaccgcgcaccctatgtcgacgtggtcttcggtccacagaccctgcaccgcctgccggaaatgatcgatgccgcgcgcgtcaccaagctgccgcaggtggatgtgtcgttcccggaaatcgaaaaattcgaccacttgcccgagccgcgtatcgatgggccaagcgcctacgtgtcggtgatggaaggctgcagcaagtactgcaccttctgcgtggtgccctacacccgcggtgaagaagtcagccggccgtttgacgatgtgctgtcggaaatcatccacttggccgaaaacggcgtgcgcgaagtgaccctgctgggccagaacgtcaatggctaccgcggcctgaccgaggacggccgcctggccgacctggcagagctgatccgcgtggtggcggccgtggacggtatcgagcgcatccgctacaccacctcacacccgctggagttctccgacagcctgatccaggcccacgctgaagtgccggaactggtcaaacacctgcacttgccggtgcaatcgggctcggaccgcattctggcggccatgaaacgcaaccacacggccctggaatacaaatccaaactgcgcaaattgcgcgcagcggtaccgggcatctgcatcagttcggactttatcgtcggtttccccggcgagaccgagaaagatttcgagcagaccatgaagctgatcgaagacgtcggtttcgacttctcctactcgttcgtctacagccagcgccctggcaccccggcggccgacctggcggacgagaccccggaagcgctgaaaaaagagcgcctcaatgcgctgcaacaccgcttgaaccagcagggtttcgagatcagccgacaaatggtcgggtccatccagcgcatcctggtcaccgactattcgaaaaaagacccgggcgaattgcaggggcgtaccgagaacaaccgaatcgtaaacttccgctgcgataatccgaccctgatcggccagtttgccgatgtgcatatcgatgcggcgcaaccgcactcgttgcgcggatcattgttgcaataatgacctgattaacagcgactcaatgtgggagggggcttgcccccgatgacggcgtgtcagacacagatgttttatctgaaccggcgctatcgggggcaagccccctcccacattttgaccgtgcaacattccgatgacgtaagtgctttcgcacacgggcagctggcgttattctctatttcacctcaacagccaaagggcggctaaaaacaaccttgaacgcacccatcgcagaaccccatcgttttctcctcgagccgtttgaggctcgccgtttcgccaatctgtgcggacagttcgacgagcacctgcgcctgatcgaacaacgcctgagcatcgagatccgcaatcgcggcaatcagttcgagctcattggtgaaccccaacacaccacgtccgcagaaaacctgctgcgccgcctctaccgtgaaaccaagggtagcgagctgtcgccggaaaccgtgcacctgtacctgcaggaatcggccgtggaagacctggccaacaaccccgtggccgaagccagcgtggccctgcgtaccaaaaaaggcatgattcgcccgcgcggcttgaatcagcagaagtacgtcaaggaaatcctcggcaacgatatcaacttcggcatcggccccgccggtaccggcaagacctacctggccgtggcctgcgcggtcgatgcgctggaacgcgagcaagtgcgccgcatcctgctggtacgcccggcggtcgaggctggcgagaagctcggcttcctgcccggcgacctggcccagaagatcgacccgtacctgcgcccgctctacgacgcactgtacgagatgcttggcttcgaatacgtggccaagctgatcgaacgccaggtgatcgagatcgccccgctggcctacatgcgcggccgcactttgaacaacagcttcatcatcctcgacgaaagccagaacaccacggtcgagcagatgaagatgttcctcacccgcatcggtttcggctccaccgccgtgatcaccggcgacatcacccaggtcgacctgcccaagggcactaagtcgggcctgggccaggtgatcgaggtgctcaaggatgtgccgggcatcagctttacgcacttcatgcccaaggatgtggttcgccacccgctggtacagcgcatcgtcgaggcctacgagcgtttcgagcaccgtgacgatgggttgtccaaggacgttcgccgcgatgcttgagctagacctgcagctggccaccgaagcgcccgcccccagtgaagcccagttccgtcagtggtgcgccctggccctgcgccagcgcagcgccgactcggaactgactattcgcctggtcgatgagcccgaaggccgcgaactgaaccacacctggcgccagaaggattacgcgaccaacgtgctgtccttccccgccgacgtgccggatgagctgctggatatcccgttgctgggcgacctggtcatctgtgtcgcggtggtggagcgcgaagcgaaggaacaaggcaaggaacttgaggcccactgggcccatctagtcatccacggctgcttgcatctcttgggttacgaccatatagacgatgacgaagccgaggaaatggaaacactggaacaaacgttgcttgcagaattgggtcatcgggacccgtatgccgacgacgaagcttaaaaacactcaactgtaacaataaaggattcagagtaatcgctatgagcgaagaccgatcgagcaacgggcagaagtcatggctgggtaaactgacccaggcttttgcccacgagccgaaaaaccgccaggagctgctggagctgctgcgcgaggcccatcagaacaagttgctggacagcgaagcgctggccattgtcgagggcgccatccaggtggctgacctgcaagtgcgggacatcatggtcccgcgctcgcagatgatcagcatcaaggcgacccagaccccacgggagttcctcccggccgtgatcgactcggcgcactcgcgctacccggtgatcggtgaaagccatgacgatgtcatgggcgtcctgctggccaaggacctgctgccgctgatcctcaaggagaacggcgacagcttcaacatcaaggacctgctgcgcccggcgaccttcgtgcctgaatccaagcgcctgaatgtgctgctgcgcgaattccgcgccaaccacaatcacatggccattgtgatcgacgaatacggcggcgtggccggcctggtcacgattgaagacgtgctggaacagatcgtcggcgatatcgaagacgaacacgacgtcgaagaagacagctacatcaagccactgcccagcggtgacttcctgatcaaggcgctgacgccgatcgagaacttcaacgagttcttcgacagcgaattttccgacgacgagttcgacaccgtcggtggcctggtgatgagtgcgtttggccacctgccaaaacgtaacgaaaccaccgagatcggcgcctatcgcttccgtatcctgaatgccgatagccgtcgcatccacttgatccgcttgacccctattgcccgctaaggactgacatgcgccgtctcaccgctcccggctggcccggtaatttgctggccgtggtggccggcgccatcactaccctggcgctggcgccgttcgacctgtggccgtttgcgctggtcgcggtcggcttgttctatgtggggctgcgggacctgagcccacaccaggccctgggtcgtggctggtgtttcggcttcggcctgtttggtgccggcaccagttggatctactacagcatccaccacttcggcggcgcttcggtgttgctggcggggttcctgatgctgttgttcaccgccgccatcgcctggttcttcgccctgcccgcctggctgtgggcgcgctggttgcgtcgcaatgaagcgccgctggcggatgccttgaccttcgcggcgttgtgggtcggccaggaggcgtttcgcggctggttccttaccggtttcccgtggctgtactccggctacagccaactcgacggccccctcaccggcctcgcgccgctgggcgggatgtggctgatctcctttgccctggcactcaccgccgccctgctgtgcaacctgccgcgcctgctggccggcaagcgcaacgcctttatcggtgccggcctggtgttgctggtcgcgccttgggcgatcggcctggcgctcaagcatcacgcctggaccagtccgtccggcgcgccgctgagcgtggccgccatccagggcaacgttgaacagagcatgaagtgggacccggagcagctcaacgcgcagctcgcgctgtatcgcgacatgagcttcagttccaagcgtgtcgatttgctggtatggccggaaacggcggtgccggtgctcaaggagtctgtcgaaggctacctgggcatgatgggcaagttcgccgccgaccggcacaccgcgctgatcaccggggtaccgatccgccaggaagtgcaccaccagaagcgctacttcaatggcatcaccgtggtcggcgaaggcgacggcacctacctcaagcagaaactggtgccgttcggtgagtacgtgccattgcaagacatgctgcgcggcctgattgccttcttcgacctgccgatgtcggacttcgcccgcggcccctcggaccaggcgatgctgcaggccaagggatatcagattgcgccgttcatttgctacgaagtggtgtacccggaattcgccgctggcctgtcggcgcagagcgatctgctgctgaccatcagcaacgacacctggttcggccgctccatcggcccgttgcagcacctgcaaatggcgcagatgcgcgcgctggaagccgggcgttggatgatccgcgccaccaacaatggcgtgaccggcctgatcaacccgttcgggcagatcaccgcgcagatcccgcaattcgagcgcggcattctctacggcgaagtggtgccgatgcacaacctcacgccgtacctgcaatggcgttcgtggccgttgattatcctgtgcctggggctgttcggttgggcgctgctggcgggccgcatgtccaaaaccgtctgacagacaacccaaaaccaatgtgggaggcggcttgcccccgatggctgtgtatcagtatcagatgtactgactgacactctgctatcgggggcaagccccctcccacatgttgatctgccgcgttatcggtagaacaaccgatagcccacctgccccaccgcttcgttgatcaactgcccgctgcgccacactgagacgaactccggcatccagccacccagtggcctggcgttgtccacgcccaggaaccccaccggcgccggcaccacggtaaagccggctctctcaaagctccacaccgaacgcggcatgtgccaggcctgggtcaccaccaccacgcgcttgatgccttcgggcaagagaatctctgcgctcatctgcgcgttttcccaggtagttcggctgcgctcttccttccagcgcaccgtcacaccgaagtcatcctgcatcgacaccgccatcagctccgcctcgctaggcggtgtgccgtaatgcaggccgccggtcgtcagcaccggcagcccggaggccttggccaatcgtgcggcatagcgctggcgctccaggccggtacccgtcggctggtcggtgccccaggccgggtcaccgcgctcacgcccggagcccaacaccacgatcgcatcggcgcgttgcgccagcgtcgaccaatcttcccgcgccaacggcggctcagtctccagggctcgtgcgccccactccaccatcaccggcaggctgatcagccacataccgccaaaccccagcgcaaagcagcaacccgccaagcgtggccggctacgccgaaaccaccaggcaagggcgagcagcagcaagagaatgccgggcggcaggagcagttgtttaatgaagtaacgaataggcatcgggcatctccaaagatgcccgaagcctaaggtgtaacggggtttagcgacaatctttaccgtgacatgacgcgaaggtgttgctctagggggagtgaactacttgtagcgtacgaagcggcgtttttccgggccgcgaccgaccgacaagtccttgagccacaccaccttggcagagtgcgtgggctccttgggtggcggggttgccaccagaggaggcgcaccgcgcccattccgctccagataagccttgatcagttccaactccgcgcgggtcaaaccgcgcagttccaactccacaggccgttcatcacgcaatcggcccgctgtcctcgctgcatccaatgcacgacccaatcggtcgatcagtccttcgtagatttccggtttcgttacgattcgctgcgattcaaccatcccctcacctcattgaagaaagacttgctccccaataaacagcgtagcccccgtggctgcgcctgcccggcgccgcgacagacggccctgccagagcaatcagggtttccctcgatagagtggggtcatgtatgctacggcgcttcctgtaactccacttcccgcagggtttgggcacggacgcgccgctttttggtgtcgatcaacctgaatgttgcaccgaagaggattaggccacccctattcagttcaaaagtagccatgcacgaacaatatcagccccgtgaaatagaaaatgccgcccaaaccttctgggacgagcaaaagtcctttgaagtcagtgaacagccaggcaaggagacttactactgcctatcgatgttcccttaccccagcggcaagctacacatggggcacgtgcgtaactacaccatcggcgacgtgatttcccgttaccagcgcatgcaaggcaagaacgtcctgcaacccatgggttgggatgccttcggcatgccggcggaaaacgccgcgatgaaaaacaacgtggcccccgccaagtggacctacgaaaacatcgcctacatgaagtcccagctgcgcagcctgggcctggcggtggactggtcccgcgaagtcaccacctgcaagccggattactaccgctgggaacaatggctgttcacccgtctgttcgaaaaaggcgtgatctacaaaaagagcggcaccgtgaactgggacccgatcgaccagaccgtccttgccaacgagcaagtgatcgacggtcgcggctggcgctccggcgcgctgatcgaaaagcgcgaaatcccgatgtactacttcaagatcaccgcctacgcggatgaactcttgtcgagcctcgacgacctgccgggctggccggaacaggtcaagaccatgcaacgcaactggatcggcaagtccaagggcatggaagtgcagttcccgtacaacgtcgactcgatcggcgcagcgggcgcactgaaagtcttcaccacccgtccggacaccctgatgggcgcgacctacgtcgccgtggctgccgaacacccgctggccacccaggctgcacagaacaaccctgagctgcaggcgttcatcgccgaatgcaaaggcggcagcgtggccgaagccgacgtcgccacccaggagaaaaaaggcctgccgactggcctgttcgtcgagcacccactcaccggtgaaaagctgccggtgtgggtcgccaactacgtgctgatgcactacggcgatggcgcagtaatggctgtgccggcccacgacgagcgtgatttcgaattcgccaccaagtacaacctgccgatcaagtccgtggtgcgcaccagctcgggcgacaccaacccggccccgtggcaagacgcctacggcgagcacggcacgctgatcaactccggcgagttcgacggcctggatttccagggtgctttcgacgccatcgaagttgcgctggtcaagaaaaaccttggtgcctcgcgcacccagttccgcctgcgcgactggggcatcagccgccagcgctactggggctgcccgatcccgatcatccactgtgaaagctgtggcgacgtgccagtgccggaagaccaactgccggtcgtcctgccggaagacgtggtgccggacggcgccggttcgccattggcgcgcatgcccgagttctacgagtgcagctgcccgaaatgcggcgcgcctgccaagcgtgaaaccgacaccatggacaccttcgtcgagtcctcgtggtactacgcccgctacgcctcgccgcactatgaaggcggtctggtagagaaatccgcggccgaccactggttgccggttgaccagtacatcggcggtatcgaacacgccatcctgcacctgctgtacgcgcgcttcttccacaagctgatgcgtgacgaaggcctggtgagctccgatgagccgttcaagaacctgctgactcagggcatggtggtcgccgagacttactatcgccgcgaagccaacggcgcttatacctggttcaacccggccgacgtcgagcttgagcgcgacagcaaagccaaggtcatcagcgccaagctgatcgccgacggcctgccggtggaaatcggcggcaccgagaagatggccaagtcgaagaacaacggcgtcgacccacagtcgatgatcgaccagttcggcgccgacacctgccgcctgttcatgatgttcgcctcgccgcccgacatgagcgccgaatggtccgactccggcgtcgaaggctcgcaccgtttcctcaagcgcgtctggcgcctggcgcacgctcatatcagccagggcctgccgggcaaactggacgtggccgccttgagcgacgagcagaaactcattcgccgcagcacccacctggccatcaagcaagccagccaggacgtgggtcagaaccacaagttcaacactgccatcgcccaggtaatgacgctgatgaacgtgctggaaaaagcaccacaagccactgagcaggatcgcgcactggtacaggaaggcctggaaacggtcaccctgctgctggcgccgatcacgccgcacatcagccacgacttgtggaaccgcctgggccacagcgacgccgtcatcgatgcgcgctggccggtacaggatgacagcgccctggtacaggacacgctgcaactggtgatccaggtcaacggcaaactgcgcggccagatcgacatgccggccactgccagccgcgaagacgtcgaggcggctgcccgcgtcaacgagaacgtgctgcgctttaccgaaggcttgacgatccgcaaagtgatcgtggtgcctggcaaactggtcaatatcgtcgcgagctaatcggatcgggcgcagggcgtaaaccctgcgtcgaacaaagccttcagggcctcgacaaggcccacatggtttcaaggggagcaacaaaatgattaaacgcaatttgctggtgatgggccttgccgtgctgctgagcgcttgcggcttccagctgcgtggtaccggcaccaatgacctgacgatcaaggaactcgacgtcagcgcccgcaacgcctacggcgatacggtgacgcagttacgtcaggtgctggaaaacagcggcgtgcacgtttataccggcgcgacgtacaaactgttcctggtggacgagcgagaaacccagcgtaacctgagctacgccagcgccgggcgtgcgtccgacatcgaactgaacactgcgctcaacttcgaaatccagggccgcgatcatctgccgctgatgggtgacaagatccaggtgcagaaagtggtcagccatgatggcaacaacctggtgggttcggactccgaaatccagcaagtgcgcaaggaaatgcgtcgcgaactggtacagcgcatggtgctgcgcctgtcgatgctgactccggaacaactggagaccctgcagcaacaggctgacaacaaggccaaggccgacgccgacgcgctgaaagctgccaaagagtacgaagacaacacgccgaaacagtcgcctgttgaagtccctgtcgagtaagccggacggggcgccccaaacgccccgtttaccctgcctatgaaactcgcccccgcccaactcgccaaacacctgcaaggtggccttgcgcctgtctacattgtcagcggtgatgatccgctgctgtgtcaggaagccgccgacgccattcgcactgcggcacgccagcaaggtttcgacgaacgccaagtcttcagcgccgacgccagcttcgactggggcacgctgctgcaggcgggtgcgagcatgtcgctgtttgccgagaagcgcctgctggaactgcgcctgccttcgggcaagcctggcgacaagggcgcggccgccctgatggaatactgctcgcgccccgccgaagacacggtattgttgatcagcctgcccaagcttgatggcagcgcgcagaaaaccaagtggggcaaggccctggtagaaggcgcacagacccagttcatccagatctggccggtggacagcagccagttgccgcaatggattcgccaacgcctgtcccaatcggggctgtcggcaacccaggacgcagtggagttgatcgccgcccgggttgaaggcaacttgctggccgctgcccaggagatcgaaaagctcaagctgatggccgaagacgggcagattaccgtcgagaccgtccagggcgccgtggccgatagcgcgcggttcgatgtgttcgggctggtggatgcgatcctcaacggcgaacccgctcacgccttgcgtatgctcgaaggcctgcgcggcgaaggcgtggagccgccggtgattctctgggccctggcccgtgaactgcgggtgctggccaatattgccctgcaatatagccagggtacgccgctggacaaatgcttcagccaggccaagccaccggtgtgggacaagcgcaaacccttgatgagcaaagcgctgcaacggcactcggcgcaacgctgggcacaattgctgctggaagcgcagcgcatcgacgcgcagatcaagggccaagccgctggttcgccttggatgagcctgagccgtttatcgttgctgatggccggccagcgcctgacattgccggcagaatagtcctacctctcgaagggctttacagcggcgcaacatcggcagatgatttgcaccgcttccaccacccaacgagagtaacgaccatgagcaaaaagccatccaagcatggccccaacaaggccaaatccatcatcgcccagccactgttccgcagccgtcaggaacgcgccggcaagggcaaaggcagctaccgccgcgaagccttccagtctaatagctgggaggcttcttactttctggctgcctgaaggcaagcagccctctggcatgataaggtctgcacctgatttgcaatccctggacctgtgcatgccctctagtctttcccgtcgttggcactttcgccaactgatcgctgcctccagcctcattctgctcgtcgcctgcgcggagaaacccaccgccgccgacgctcaaccgctgcccaagctccagaccgcccctgtggttgcgcccgccgtcgtggccccgctggccgtggacaatcttgatatccagccgacccagaccttcgccgaatggcaggcggccttccgcgtgcaagccctgcaggccggcatcaccgccgccgtattcgacaacgcatttgccaacgttacccccgacatggcggtgatccgcgccgaccgcagccagccggaattttcccgcccggtgtgggaatacctcgacggtgccctgtcgcccgtgcgcgtgcgcaacggccaggcgttgctggtcaagtacgccgacatcctgcaaagcatcgaacagcgttatggcgtcgaccgccaggcgctggtgtcggtgtggggcatggagagcaacttcggccagttccaaggcaacaactcggtgatccgctccctggcgaccctggcctacgaaggccgccgcccggcatttgcccaggcgcaactgctggcggcgctgcagatcatccagcacggcgatatccaggccgaccagatgaaaggctcctgggccggcgccatgggccagacccaatttatcccaaccacctacaacacccacgccgtcgacttcgatggcgacggtcgccgcgatatctggaacagcccggcagatgccctcgcctccaccgcgcactacctgcaaagctccggctggcagaaaggccagccgtggggttttgaggtgaaacaattgccggcgaacttcgactacgccctggccgatggcggcatccgcaagacggtcgcagaatggctgaaactgggcatccaactgccaccgggtgccagcctgccacccaacgtcgaccaactctccgctgccctgctgttaccggccggttatcgcggcccggcgttcctggtgctggataacttccgtgcgatcctcaagtacaacaactcgtcgtcctacgctttggcggtcggcctgctgtcggaacgtttcggtggcggcggcgtgattcgtggcgattggccgaaagatgaattgccattgagccgctcgcagcgcatcgacttgcagacggccttgagtgccaatggctatgacgcgggcaaccctgacgggattatcggcgccaatacgcgtaaggcgattcgtgcggcgcagcaggccttgggctggccggcggatgggtatccgacggtgaaactgctggagtcgttgcagagccgctagatcggcatatggcggctattgctatcgggggcaagccccctcccacatttcgacagcattccattgtgggagggggcttgcccccgatgacggcctgacaggtcgcaaaaactcaggctttgaacactacatcctgctccaacaccacccgctgctcccccgcatccaaccgcaccaacgcgcccatcggcaacgtcaggttcgggtcgcaatgcccactgcgccaaccggacaacacggggatgcacagcggctcgaaggtctgcttgagcaagcgctccaacgcaaccttatccacacccgccacgtcccctaccagtacaccggcgacctgcgccagcttgcctgccaggcgcaggtgcgtcagcaggcggtcgatgcggtagatcggctcgttgacgtcctcgatcaacaggatgatgccttctgcgtcgatctcaaagggtgtgcccatgactgccgcgatcatcgacaggttgccgcccagcaagcgcccacaggcgatgccaggctcgattgtggtcagcgggtacgccaccgggtgcatcaactcgctgccagcgcccaactggccgcgcagcaggctgaacaatgaagactcggtaggctgttgcttgtcgcccaacagatcggcgttgagcatcggcccgtggaaggtcacgaagccggcgtaacggctgattgccaggtgcagcgcggtgatgtcgctgtaacccacgaagggtttggcattggcgcgcagcaggtcgaagtccaggctatcgagcaggcgcggcgtgccgtacccaccacgcaggcagaagatggcgtcgatttcagggtcggcgaaagctttgtgcaggtcgttgaggcgggttttatcgctgccggcgaggtagccatcgcgttcatagacacccgggaagatgcgcaggtcgtagccgcgggcgcgcatccattggccggctttttcgacgtccagggtggcggggccggcgggggcgatcagggcgatggtgccttcgctacggagggcaggtactgcagcggtcatccacgactctccttggctaacgcgaaacaactgtgggaggaggcttgtccccgatggcggtgtatcagtatcagaagtgctgactgacagtccgctatcgggggcaagccccctcccacattaacctgcggtgccgctcacagcgctatcaggaaaccaggctcgccttgaccagcttggcctgctcgtccgcatggtacgaggagcgcaccagcgggcccgacgccacgttcttgaagcccatcttgtagccttcctcggcgaaccaggcgaaggtgtccgggtgcacgaaacgctgcaccggcaagtggctgcgggacggttgcaggtattggcccagggtcagcatgtcgatgtcgtgttcgcgcatgcgcttcatgacttcgatgacttcttcgtcggtctcgcccaggcccagcatcaggccggacttggtcgggatgtgcggcatcatctgcttgaatttctgcagcagggtcagcgaccactggtaatccgaacctggacgcgcagccttgtacaggcgtggcacggtttcgaggttgtggttgaacacatcaggcggctcggcggcggtgatttccagtgccacgtccatacggccacggtagtccgggaccagggtttcgagcatcacgttcggcgacagcttgcggatttcgcggatgcagtcggcaaagtgctgggcacccccgtcacgcaggtcgtcgcggtctaccgaggtgatcaccacgtacttgaggcgcaggtcggcgatggcgatggccaggctctccggctcgttgacgtccagtggcttcggacggccgtggccgacgtcgcagaacgggcagcgacgggtgcagatgtcacccatgatcatgaaggtggcggtgccgccggagaagcactcgcccaggttcgggcaggaggcttcttcgcacacgctgtgcagtttgtgcttgcgcagcagcgccttgatacggtcgacttccggcgaaaccgggatgcgcacgcggatccagtcgggtttcttcggcaattcggtggtcggaatgatcttcaccgggatgcgtgcaaccttctcggcgccgcgcagcttgacgccggcttccaccttggcacgcggggccggggctgggcgttcggtaacgtccaccgtcgggatcatggtttgcactgcatcagtagtcataatcagtcgattccgcccgtaagggtcgtctgctcagcatagtcgaggtgtttgacgagctgcgcacgcagccgggcacttacctcggcaaatttaatcggtgtggcgtggtcactcagttgcgtcattgccaacccggcatagccacacgggttgatccgccggaacggcgccaggtccatgtccacattcagggccaggccatgaaaggaacagccgtggcgaatccgcagccccagggaggcgattttcgcgccatcaacgtacacacccggcgcatccggcttggctgcggcgctcacgccgtaactggccagcagctcgatcaggcaagcctccatgcggctgaccaggtcgcgcacgccgaaccccagcttgcgcacatccagcagcaagtaggccaccagttgacccggcccatggtaagtcacttggccacctcggtcgacctgcaccaccggaatttcccccggcagcagcagatgttcggccttgccggcctggccctgggtgaacaccggcgggtgttccaccagccagatttcatcgggggccgaggtgccgcgctcgttggtgaagcgctgcatggcgtgccagacgggctcgtagtccatccggccgagctcgcgaaagcccaggacctgtgacatcacagcaccatgtgcacgaagccggtggcccgcagttcactgttgatgttgtagagctggtcctgatccgtcgcaacgatgtgcaactggatcgtggtgtatttgccggttgaactggagcgttcatccacgcgctgatcgttgatcgtggcgtgtttacgcacgatctcaaggatcaggtctttacggccgacaccggtatcgctgatcaccttgatgggatagtccaccaccgggaattcgatctttggcgcctttacttctttatcggtcatggcgtaacggcctcgtaagcgtaagccgtggcgacgggcaaagccccgtgtcggatcaacacggggctttgcaggtgcacacaatcagttgaacaggctgtagaagaatagacggatgctatcccacacgcggcggaagataccaccttcgtcgacagcgtccagggcgatcaggtcggcgctgtgcaccaccttgtcgtccagcttcacttcgactttaccgatcacgtcgcccttggcgatgggcgcaaccagttgcgggttcatggtcatgctggcagcgagcttcttcagctggcctttaggcatggtcagggtcaggtcttcagccaggccagccttgacttgagaggtcgcgcctttccacaccggcgcggtcgccagttcagcacccttctggtagaaggtctgggtttcgaagaaacggaaaccgtaggtcagcagcttttgcgtctcggccgcacgggcctgttcgctgttggtgccgaagaccacggcaatcaggcgctggccgtcacggacagcggacgacaccatgcagtaaccggcttcttcggtgtggccggttttcagaccatcgacggtcttgtcgcgccacagcagcaggttgcggttaggctgcttgatgttgttccagaagaattccttctgggagtagatcgcgtagtgcaccgggtcgacacgaatgatcgcgcgcgccaggatcgccatgtcgtgagccgacgagtagtgctccgggttcggcaggccggtcgggttcatgaagtggctgttggtcatgcccaggtcggccacggttttgttcatcatgtcggcgaatgcatcttcgctgccggcgatgtgctcggccagcgcgacgctggcatcgttaccggactggatgatgatgccgtgcaacaggtcgctcacagtcacctgcgaacccaccttgatgaacatccgcgaaccgccggtacgccaggcgttttcgctgacggtgaccgggtcgttctcgccgatctggccgcgacggatttccagggtcgcgatgtaggcggtcatcagtttggtcaggctggccggtggcaggcgctggtcaccgttgttctcgaccagcacgttgccgctggcggcatccatgaggacccaggccttggcagccagttgcggggaagccggcaccatttcaaccgcccaggcggccggggtgatgatcagcgaaagaagcaggcacgtgcgtttggctaaggtggtgatgttcatccgtctctcgaaattgcttatggaaacttgccctcgcgggcaaaacttattcagacagcccgctaccagactgtcacgtgttcggttgcccgctcaccccttgcccccgggtttttattgttcaacgagccaacaaccagggttcaagcccgcgcacgggccagaaccatcaattctgttttattcagcggtgaccacgctaggctgacccagattggccaggcgcacgctgttctgcacttgcgccacttcgctcggcgagccgatcgggcccatgcgcacacggtgcaacgtctgctggttacgcacgatggagctgatgaacaccggcgcgctgaccatgctgctgagcttggaccttaacagttctgccgcatccgggttggcgaaagcgcccacctgcaagtattggccaccggccagcgaagcaccctgggcagcctgcggcactgccacggtgtccggggcgtgctgttgtggcggcggtgtccactgctcgaccttgcccgccgatgcggtgatttgcggttgtggtgtctgcggctcgttgagcatcaatggcgccggcttgccgcgctgggcccagtactgcgccgggtcgatgccttcgaccttgacccgtgcggtgccggtttcggcgtagccgagtttcttcgcggcggcgtaggacaggtcgatgatgcggtccgagtaaaacggcccacggtcgttgacgcgcaggatcaccgtgcggttattgtccaggttggtcacccgcacataactcggcagcggcaacgtcttgtgcgcggcactcatgccatacaggtcatacacttcgccattggcggtgttctggccgtggaacttggtgccgtaccaggacgccgtgcccgattgcacgtaggtcttggattcctgcagcgggaaataggtcttgcccagcacggtgtacgggttggccttgtaggcaccggtgtgcagggtgggcgtggcgtccgggatcttcgacacatcgacatcccaccacggcgctccgtctttgtgcgcacggttgatgtccaggcccggctgggaacgaactgcggtgcccccggacttctgcgccggaccgcggctggtggagcaactgacgaccagcagggacaacgcgacgaacgccaccagcttgagcggttgattgaacggcgatgcccgcattacttagtgccccgtgcttggaccagcatgtctgacagctgatgtacggccatggcgtacatcacactgcggttataacgcgtgattgcgtagaaattcttcaggcccatccagtattccgggccgttttcgccctcaaggcggaatgccgtgaccggcatctcgtcaggcagcgcattctgactcgaccagcccagcgcccgcaactccccgaccgtcttggccggctcgatgccctgcgtcaggccttcgtcggcgcgatcgcccgtgacatccgcacgtatcaccaccggctcaccggcgacccagccatggcgcttgaagtagctggccacgctgccgatggcgtcgtcggggttgctccagatattgatatgcccgtcgccgtcaaaatccaccgcataggcgcggaagctgcttggcatgaactgcggcaagcccatcgcaccggcgtaggagcccttgagggtcagcggatcgacctgctcttcacgggccaacagcaggaattcgcgcagttccttgcggaagaactcggcgcggggcgggtaatcgaagcccagggtcgacaaggcgtcgatcacccggtagctgccggtattgcgcccgtagaaggtttcaatgccgatgatcgcaacgatgacctgggccggtacgccgtactcttgctcggcgcgggccagcactgcctcatgctggcgccagaagtccacaccacgggccacgcgggcgtcggtgaggaacatcgggcgatattccttccactgcttcacacgctcagcggggcgcgaaatggcgtcgaggatcgcctgctttttctgggcttcgcggaacacacccatcagctgttcaccggcgaaaccatagtcgcgggtcatctcaccgacaaactcggcgacctggggtgaaccatcgtagtcaccggcctgcgcctcttgcgttgcgcccagcagcccaatcaggcccatccaggacgcgtgccgagtcgcccagccgcgcattacttgcattgacatcttcaccttattcaaacctgtgcgatccatttgcgatgcgtatgaatcgacatcaaaaccccaaacgctgacagcaatgtcaccagcgaagttccgccgtagctaatgaatggcaacggcaccccaaccaccggcaacaggccactgaccataccgatgttgacgaaaacgtaaacaaaaaaagtcatggtcagggcgccggcgagcaatttgccgaacagcgtctgcgcctgcgcggtgatcaccaggccgcgaccaatcaacagcagatagatcagcaacagcgcgcaaatgcctaccaggccgaactcttcgcccatcaccgcaataatgaagtcggtgtggctctcgggcaaaaagtccaggtgcgactgggtacccagtaaccagcccttaccaaatacgccgccggaaccgatggcggccttcgactggatgatgttccagccggtgcccaacggatcgctttccgggtcgaggaacgtgagaattcgctgcttctggtagtcgtgcataaagaagaaccacatggccacggccaccggcaccgcggcagcgagcacgctgaggatccagcgccagcgcaggccgcccatgaacagcacgaacgcaccaccggccaggatcagcagcgaggtgcccaggtccggctggcgcacgatcaggatgaacggcacgccaatcaggatcaggctgatccccacgtgcttgagttgcggcggcaaggtgcgcttggacaggtaccaggcgatggtcgccggcatcaggatcttcatgaattccgacggctggaagcgaatcacccccggaatgttgatccagcgggtcgcgcccatggcgttgtggcccatcacgtccaccaccaccagcagcaacaccccggcgacgtagcccaacggcacccagcgcgccatgaaacgcggctccagttgggcgatcaccaccatcgacaacaagcccaggccaaacgaagacgcctgcttgatcagcaggtcccagttcttgccgctggccgagtacaggacgaacaggctaccggccgccagggtcagcagcaggatcagcaacgggccgtcaatgtgcatgcgttgcagcaacgtcgcgcggcgacgcatcacatcctcactggagaggatgcggtcaaaattactcttcacgggccgtaacctcggtgcttgaagggggcccgccgtattcgggcttgagcctgccgtcgtcggccaacagccaggcgtccattacttggcgcaccacgggcgccgcgacgccggagccggactcgccgttctcgaccatcaccgccaccacgatcttcgggtcgtccgccggggcaaagccgacaaacaaggcgtggtcgcggtggcgctcctggaccttggagcggtcatatttttcgccctgcttgatcgccaccacctgggcggtaccgctcttgccggcaatgcggtactgcgcgccgatggccgccttgcgcgcggtgccgcgtgcgccgtgcatcacttgctgcatgccgtggttgaccttggtccagtcggacgggtcgcgcagtacgatgtccgggatcgggttttcatccagaggcttctcgccctcgatggtcttggccaggtgtggacggttccagatgcctttgttggcgaccaacgccgtggcctgcgccagttgcaacggcgtggcctgcatgtagccctggccgataccgaggatcagggtttcgcctgggaaccacgcctggcggcgggtcgcgcgcttccactcccgcgacggcatcaggccgggggactcttcgaacatgtccagcgagaccttctggccaaggccgaacttgcccatgtaagcggacaggcgatcgatcccgagcttgtgggccaggtcgtaaaaataagtgtcgttggagcgcatgatcgcggtgtccaggtcgacatagccgtcaccggtgcggttccagttacggtatttgtgatcgtagttgggcagcatgtagtagcccgggtcgaacacgcggctggaggccgtgaccacacctgcgtccagtccggcaatcgccaccgccggcttgatggtcgagcccggcggatacaggccgcgcaacacgcggttgaacagcggccgatcgatggaatcacgcaactcggcgtaggccttgaagctgatcccggtcacaaacagattggggtcgaaactcggctggctgaccatcgccaggacttcgccggtagtcgggtccagggcaaccaccgcgccgcgccgcccgcccagggccatctccgccgcttcctgcagcttgatgtccaggctcagcacgatgtccttgcccggcaccgggtcggtacgcttgagcacccgcagcacgcggccacgggcgttggtctcgacttcctcgtaacccacctgaccgtgcaactcgggctcgtagaaacgctcgatgccggtcttgccgatatggtgggtgccgctgtaattcaccggatcgagggttttcagctctttctcgttgatccgccccatgtagccaacggagtgggcaaagtgtggcccttgcgggtaatgccgcaccaactgcgccaccacttccacacccggcagacgaaactggttcaccgcaatccgcgcgatctgctcttcggtcagctcgaacaggatcggcaccggctcgaaaggccggcgcccctgtttcatgcgtttctcgaagatcacccggtcttccggcgtcagttgcagtacctcgacaatcacatcgaggatctgctgccagtcgccggaacgctcgcgggtcatgctcaggctgaagctgggccggttgtccgccaccaccacgccattacggtcgaaaatcagcccacgggtcggcgggatcggctgcacatgcacccggttgttttccgatagcgtggagtgatagtcgtactggatcacctgcaggaaatacaggcgggcgatcagcacgcccaacaacgccaccaccatgattgcgccaaacaccacgcgtgcgcgtacgagacgtgcgtctttctcgtggtccttgatgcggatcggttgggtcatcgggaggggcgcagattatttgtggtaagggtgcccggacaggactgtccaggcgcgatacagctgttcaccgatcaggatccttaccaacgggtgcggcagcgtcaacgccgacagcgaccaacgctggtccgcccgcgcgcagacttccggcgccagcccttcggggccaccgaccatgaagttgaccgtacgcgagtccaggcgccagcgatccagttccaccgccagttgctcggtgctccagggcttgccgtgcacttcgagggtgacgatgcgctcgttggggccgaccttggccaacatggcttcgccttcctgacggataaagcgcgccacatcggcattcttgccccgggtattgagcggtatctctaccagttccagcgacagctcagcgggcagacgcttggcatactcgtgccagccttcttccacccacttgggcatacgtgaaccgacagcaatcagacgcaggcgcacagccgttccttattcctggtctttgttgagcttgtcgaagtgcgcgtggcccacttccgggctgtggtgcttgccatcggcggcacggctctgctcggcgcctttccacagacgctccaggtcgtagaactggcgggcgttggaagtcatcatgtgaacgatcacgtcgtccatgtccagcaacacccagtcgctgtcgcccttgccttcttcacccagcggcttcacgccctgggctttgacggcttcacggactttatcgagcatcgcgccgatctgacggttcgaggtaccggtggcgataatcatgaagtcggtgatgctttgcttgtcgcgcacgtccagcacctggatgtcctgggctttaacgtcctccagggcagccaccgcgacctttaccagctcttcgccagccagttccgggcctacgtgggcttcaaccggcagcggcgcgcttttgaaggtgcctttgcgcttaactttgcttacgtctttgttcgtcatataaaactcgttttgctcgtatgttcgggcgcttgctgcacgaattttcgtacgttcaagcgcgccttttcagttcgacgcacggtaaagcccgtgcgcatcgatgtaggccaggaccgcgtcaggcaccaggaaacgtaccgacttcccgctggccagcagttgacggatctgggtggcggacaccgcaagcggggtctgccagacgaatgcaatattcccgttcggcccggtcagggccaaggggtcacttaccgaccgcgcggccagcaggttgcgcaaggcatccggcggttcgctgtcggcatccgggcgttgcagaaccaggatgtggcaatgctggaggagttcctcccagcgatgccaagagggcaggccgcaaaaagcgtcccagcccagaagcaaaaacaactggtcatccgcggccaactcggcacgcatcagctccagggtgtcaacagtgtaggacggtttgtcgcgcttgagctcgcggtcgtccaccaccagcggcgctatgccttccaccgccaggcgcaccatctccaggcgttgctgcggcgacacctgcggcgtatcgcgatgaggcggccgcgcgttgggcatcacgcgcagctcgtccagcgcgagggcatccgcgacttccagggcactgcgcaaatggccgatgtgcacggggtcgaaggtaccgccgagcagcccgatgcgtttacccatcaagtgcgcacatgaccgtcgccgaacaccacgtacttctcgctggtcaggccttccagcccgaccgggccacgggcgtgaagcttgtcggtggaaatcccgatctccgcgcccaggccgtattcgaagccgtcggcaaaacgcgtcgaggcgttgatcatcaccgaagcggaatccacttcgttgaggaagcgccgcgcatcgctgaaatgctcggagacgatggcgtcggtgtgcttggagccgtaggtgttgatgtgctcgatggcttcgtcgaggtcatcgacgatcttgatcgacaggatcggcgcggtgtattcggtgtaccagtccagctcggtcgcctcgatcacgtccgcgcccagcagcgcacgggtgcgctcgcaaccgcgcagttcaacgcccttgtcgcggtagatggcagccagcggcggtagcacgcgctcggcaatgccgacgtgcaccagcagggtttccatggtgttgcatggggcgtagcggtgggtcttggcgttgtcggcgatgcggatcgccttgtcgatgtcggcggcgatgtcgatgtacacgtggcacacgccgtccaggtgcttgatcacaggcaccttggcatcgcggctgacgcgttcgatcaggctcttgccaccgcgcgggacgatcacgtcgacgaattccggcatggtgatcagcgcgcccacggcggcgcggtcggtggtttccaccacttgcaccacttcggcgggcaactcggccacggccaggccctgctggatgcaggccgcgatggcacggttggaattgatcgcctcggaaccgccgcgcaggatggtggcattgccggacttgaggcacaggcttgcggcgtcgatggtcacgttcggacgcgactcataaatgatgccgatcacgcccaggggcacgcgcatcttgccgacctggatgccggacggcaggtaacgcatgtcgcggatttcaccgatggggtcaggcagcttggccacctgacgcaggccttcgatcatgtcgtcgatacgtgtcggggtcagtgccaggcggtccagcagcgccggctccaggccattggcgcggccattggcaaggtccagttcgttggcggcgccgagctcggagcgcgaagcatccagagcatcggcggcggccagcagggcacggttcttctgcgcagtgctcgcacgggcgatcaaccgcgaggcctgacgggcagcgcgacccaggcgggtcatgtagtcaagaacggactcagtcatggtcagggagtcttggcagggaggaaagcggcagattatagctgtgacgccgcccgactgacagcggtgaggggcggatggtcgaaatgaactgtaaaaacctggggttcagcggtaattaaggcgggagttgttatgattccgtcacatttagccgtatttaccctgaccgccatgcccagttcatcaccccgactccccgccagcgccctgcccgactgcttcttcgaccgtgacgcgcaaatgcttgcgcaggaactgctcgggaaagtcatccgccaccgcgtcggcgaaacctggctttcggcgcgaattatcgaaaccgaagcctattacgtggcggaaaaaggcagtcacgcttcattgggctacacagaaaagcgtaaggctttgtttctggatggcgggcatatctacatgtactacgcccgcggtggcgattcgctgaacttcagcgcccatgggccaggcaatgccgtgttgatcaaatcggcctatccatgggtcgatgaattatccagcccggcgagcctggcgcagatgttgttgaacaacccgaaccccgacggcagcccccgcacctcacaaaaactgtgcgccggccagaccctgctgtgtaaggccctggggttgaaagtgccggcatgggatgccaagcgcttcgatcaggaacggctctacgtggaggatgtggggcagaccccggcccagatcatccagaccacccgcctgggaatccccagcggccgcgatgaatacctgatgtaccgcttcgtcgatgctggctacgcgccttattgcacgcggaacccgctgcgccggggccaggtcgaaggccgcgattattttttgatttgagcagggagtggattgtatgagccaatggctcgatagcattaccggctggttgaccctgaaccccgaatggctggcggtcgcggtgtttatcgtcgcctgtgtggagtgcctggctatcgccgggctgatcgtgccgggcacggtattgttgtttgccattgccgccctcgccggcagcggcgcgctgtcactgagcgaaaccctgttgctgggtttcctcggcggcttgctgggcgacggggtttcctactacctggggcgacatttccaccagaacatccggcgcttgcctggcttgcgtcatcaccctgaatggatgaacggcgccgaaacctacttccacaagtacggcattgccagcctgctggtcgggcgcttcatcggcccgctgcggcccatgctgccaatggtggtaggcatgtgcgacatgcccttcccgcgttttgcgatggtcagcatcgtggcggcggcgggctggtcggtggcgtatctgctgccaggctgggcaaccggcgccgcgttccgcctgccattgccggagggtttctggcctgaagcgggggtggtagccgcctgtatcgcggtggtggtgggcctgagcttgaacagcagcctgcgcggccatcggcgtgccaccctatggatcggttgcgccagcctgacgatgttgatcgccttgtttatcggctacccccatctcaacgattttgaccagggcctgagcgccctggtgcaggaacaccgcagcgcctggctggacgaagtgatggtgcgcatcacccaactgggcgagttcaagaagatgttcgtcgccagcgccgtgtttaccggcttgctgctagtggctcgacaatggcgccatgcgctgtttgtcggcgcgaccctcgccggtgcggcagtgatcaacaccgggaccaagctgtttttcgcccgtggccgcccggaaatcctcacagacccactgaccagtttcagcatgcccagcggccatgcatccggcgcgtttgcgtttttcctggccctggcggtcctggccgggcgcgggcaacccatccggctacgcctgacctggatgttgctgggctgcattcccgccgcgttcattgcgttgtcgcgggtctacctcggcgcgcattggccctcggacatcctggccggcacgctgctggcgatgacggtatgtgcgttcagcctgggggtcagccagtaccgcagcccgctaccggcgatgccgcaaaaagcctggtggctgttgctgccagcattggtggcggtgctcagcttcatcgccctcaccggcacgccccacgcgctgctgcgttacgcctattaagtgaacagctcgccctgcaactcatcgagcagcatctggatcgcatccaggcgctgctgcgggtcatcgagttgcaacagatcgatcttgtcggcctcggtgaagggcagcagatacgccagctgattgcccaaggcttgctgaccgtcggcgtgggcgtccatgtccagcgaggccaccatcgggtgctcggccaacgcctggagcaatgccagcaggtcggcgtcctcttcttccagcggttggtccggcagttcttcgagccactgcacatcggccaccagcagttggtctttctgcacgccggcgtcgcgcacccggaaccggcgaccaccttcgacacgaatccccagcaggccattgtcctgctgcttgaagtcgcgaatcagcgcttcacagccgatcagcgcgtaaccgtccggggccaggcccacttccttgccgtcgaggatgcacaccacgccgaagctttcgccctttttcatgcagcgggcgaccatatccagatagcgcgcctcgaacagttgcaggtcgagggtgcagcctgggaacagcacggtattgagcgggaacagcgccagactcataaaggtttccttaaccctggtttaaacgatcaccgacacagccagcggcaggaacactgccgtggccacgcccatcagactcatggccagcgccgcaaaggcgccgcactcttcgctttcctgcaacgccaccgaggtgccgaccgcgtgggcggtcatgcccagggccatgcctcgcgcctcagggctgtgcacgcccaggcgcgacaggtacgccgggccgatcatcgcgccgatcaccccggtgatcagtacaaacaccgccgccaatgccgccacaccaccgatctgctcggccaccagcatggcgatcggtgaggtcaccgacttgggcgccatggtcatcaacatcctatgttcggcgccaaaccaccagcccaacagtacacacaggccggtggccaacaccccgcctatcaccagcgtagtaaaaatcggccagaacaattggcgaatacgccgcaggttcaaatagagcggcaccgccagggccaccgtcgccgggcccaacaggatgcccatgatctcggtgctcttgcggtactcggcgtagctcaggccacagctgatcagcacgccgatcaccagcagcatggaaaccagcaccggttgcaggaaaatccagcgggttttctcgaaaccggccagtaccagttgataggcacccagggtgatgccaatgccgaacaacgggtgatggatcaccgccatccaggcgccctgccagtcgacggtcattggtccttctccttgcgcttgaccatctgctgcatcagtacgccgacaaagcccatggcaatcaccagcgataacaccagcgcgccgacgatggcccagaagtccgcagcgatgtccttggcgtacaccatcacgcccaccgccggcggcaccagcagcaacggcaggtaacgcaacaggctgctggcggccaggctcaatggctcgccgacctcgccgcgccagaccagaaaacccagcatcagcagcagcccgatgatcggccccggcagcaccggcaccagcaaatgattgatcgcggtgccgatcaattgaaacagcaccagccaggtcaggccccgtaacagcatccgttcttccccctcgaaactcgcccgcattataagcatgcccgccctatgcatcggcattcgccaaaagcatggtgggttgaccgggccgattggccatgatgatctacattggttctctgtaacccataaaaaacacgccctgcagggcggcaaaaatgatgaaccaaggagagacgcaatgccctatgtacccgtagcgcagctcaaagactatgtcggcaaggaactgggacgttccgaatggctcactatcgaccaggcacgcatcaacctgttcgccgaggcaacgggcgatcatcagttcatccacgtcgacccggtcaaggccgcgcaaaccccgttcggcagcaccatcgcccacggtttcctgtcgctgtcgctgatgcccaagctgatggaagacattctgatcatgcccgaaggcctgaagatggcggtcaactatggcctcgacagcgtgcgcttcatccagccggtgaaggtcaattccaaggtgcgcctgaacgtgaccctgaccgatgtcaccgagaagaagccaggccagtggctgttcaaggccaccgccagcctggaaatcgaaggccaggaaaaaccggcttacattgccgagtcgttgtcactctgcttcgtataaggccgtgcctgtggtggggaaataaacctcaccacagggtatgtaaatttatgtatgaaactcgcagctgcggcatactcggcgctcaattatccggatcccgctatgcgcccactcgctcccctcgcccttgccctgttgctcaccgcttgcggagacggcgaatcgctgttgccgcccgatgcgcgcctgcccgatggcggccgctaccggggtgatgtggtcgatggcttgctgcagggccagggccgcgtggactaccccaatggcagttggtacgccggccagttcgacaagggccagtggcacggccagggcgaatggcatggcagcaacggcgaagtctataaaggccagttccagcaaggcctgttcgatggccagggcagcctgaccacggcgggcagccactatgtgggcggcttcaagaatggtcgacgcaacggcgaaggcaccctcaaagaggggcagatgacctaccgcggcgaattcaagaacgaccagtattccggcctcggtcgcctggagctggcggacggcagccagtaccagggccagttcgcccacggcaaaccgaatggcgaaggccagcgcaacgacgacagcggcaaccagttcagcggccatttcgtcgatggccaattggaaggcaacggcaccttcaacagcgccgatggcgacatctatgtcggccagttcaagcagaaccaactcaacggcaagggccgctacgagaacgccgacggcgatgtgtggatcggccagttcaaggaaggcgcgctcagcggcaagggcgagttgataggtgtggatggcagccactacgtcggccagttcgctgattggcgctttaccggcgaaggccgcctgaacctcaccgacggtagcttctatatcggcggtttcgacagcgacagctatcaaggcaaaggcaccctggtgctcaccgatggcaccgtgcaggccggcacctgggtcaatggcatgcgtgtacgtgatgccgacggcaaactgctgcccgacccattggaaatcggcgtgctggcccaaggccgcctgctggatgctgccctcgccgccgtgcccgcctccacccccgccgtggagctgtacaccctggctgtggctggcgacggtaaacaaagcgtgttcctgcgcgaagccgattacgtcagcaacatgctcgccacccgcttcggcgcacgcgggcagattcgcctggtcaaccaccgcgatcacatcaccgaccgccccctggccacccgcgaaagcttgcgtcgcgccgtgcaaaccctggccgagcgcaccggcccggaagacctggtgttcatctacatgaccagccacggcacccacgaacacgaactggtgctggaccaaccgcgcatggagctggccgacctgccagctgatgagctggcggccgtgctggcgccgctgaagaaccgcgacaagatcgtggtgatttcggcctgctactccggcggattcatcccggccctgaaggatgagcacacgctgatcatgaccgcctcccgggccgaccgcgtgtctttcggctgctccgaggaagccgacttcacctacttcggcgacgccctcttcgcccaagccctcaaccagaccgacgacttgcagcaagccttcaagctggcgcaactgcatgtggccgaacgcgaacaggcggacaacttcgaagcctccgaaccgcagatctgggcccccaagggtgtgatcgcccattggcaattattacgcaaacagcaggcacgaaaggcgctggaaagcgtctcaatgaatagcaaggaagccaaaggcaactaagctgtaacgtgtaacaagggggaaacaccatgtacctgacgcctcagcatatcttgctcgccggagccaccggccttaccggcgaacacctgctcgaccgcctgctcaacgaacccaccgtgacccgcgtgctcgcacccagccgcaagccgctggccgaacacccgcatttggaaaacccggtgggcgacccagcggtgttcttgccgcaactgagcggccgggtggatatcgccttctgctgcctgggcaccaccatcaaacaagccggttccgaagccgcctttcgcgcggttgacctggacatggtcgtggccttcgccaagcgcgcgcgggaaatgggcgcacggcacctgatcgtgatcagcgcaatcggcgccgacccgaaatcctcggtgttctacaaccgggtcaagggggaaatggaacaagccttgagggcgcaggactggccacaactgactatcgtgcggccatcgttgttgctgggagaacgcttggaaccgcgcctggcggagcaactggcagggccgctgtcgcggttgatcccgggcaaataccgcggcattgaagtgtgcgaactggcccgcgccatgtggcgcctggcgctggaagaacaggatggggtgcgggtggtggagtcggacgagttgcgcaagctaggcaagtagttttgtggtgaacagaagggcgtcatcgcaggcaagccagctcccacatttggaatgcgttccctgtgggagccgggcttgcccgcgatgaggccagcacagccacttgtcatttaaagaccacccgtagcgttgaagccaacgccaagtaccgtcaacaccgacagcggcaacaacaaagtatcgagcaccgcactcgccggcagatccaccccaggataactcggcgcctcggcaccaaacctgtccttggcgcagcagccgccattcattgcatacaaatccaaccgcgtgccggcatacaccaccggcgcacccggttgcgccgcgtccaacgtacgcgcggtggcgcagcccgtcagttgcagcgccagcaggaccaacagcgccttattcatcgctgctcaaatggtgctcgccccaacgtggcagcatgtcctggggaatgttcaacaggttgagaatgcgtgccaccacaaagtcgaccaggtcatcgatggtctgcggctggtgatagaaacccggcgaggccggcagaatggtcacgcccatgttcgacaacttgagcatgtgttccaggtgaatactggagtaaggcgcctcacggggcaccagaatcaactggcggcgctctttcaaggtcacgtccgccgcccgttcgatcaggttgttgcaggcccccgtggcaatcgccgacaaggtgcccgtggaacacggcaccaccaccatcgccgctggcgcgccggagccggacgccaccggcgacatccagtcctctttgccgtagaccttgatctgccccgccgccgcaccggtgtactcggtgaggaacgcctgcatggtctgcaccttgggtggcagcgccacgtcggtctcggtggccatcaccaactgcgcggccttggagatcaggaagtgcacctcgcggtcttcacgtaccagacagtccaacaggcgcaagccatagggcgcgccagatgcgccggtcatcgccagggtgacgcgctccggcccgctcatttcagcgcctcggccagcttgccatgcaggccgccaaagccgccgttgctcatgaccaccacatgggtgcccggcttcgcttgatgcttgacgtgttcaatgatgccttcgatggagtcgcagacgatggacggcaccgtgcacagggctgcaattgccggcaggtcccagccgaggttggccggtgcgtaccagaccacctggtcggcgtcgttgacgctttccggcaggccgtcgcggtgtgcaccaagcttcatcgagttggagcgcggctcgacaatcgcaatgatcggcgcatcgccgacgcgcttgcgcaggccatccagggtggtggcaatcgccgtagggtggtgggcaaagtcgtcgtagatggtaatcccattcacatcggcgactttttccatacgccgcttcacactcttgaacgcactcaatgcggcaatgcccatggacggcaccacgcctacatgccgcgcagccgccagggtcaccaaggcgttggcagcgttatgctggccggtcatgtcccactcgacgatgccctgggcttcaccttcgaacagcacttcaaagcgcgaaccatcttcactgagtaacttgacctgccactgcccgcccgcgccggtggtttgtaccggggtccagcaacccatctcgatcacgcgctgcaaggccggctcggtggtggggtggatcaccaggccttcgctgggaatggtccgcaccaagtggtggaactggcgctcgatggccgccaggtcagggaagatgtcggcgtgatcgaactcgaggttgttcaagatcgcggtgcgcgggcggtagtgaacgaacttggagcgtttgtcgaagaaggcgctgtcgtattcatccgcctcgatcacgaagaacggcgtgtcgcccaggcgggccgacaccgagaagttctgcggcacgccgccgatcaggaaacccgggctcatgcccgcgtgctccagcacccaggccagcatgctactggtggtggtcttgccgtgggtgccggcgaccgccaatacccaacggccttgcaatacatggtcggccagccactgcgggccagacacataaggcaaacctttattaaggacgtattcgaccgccgggttgccacgggacatggcattgccgatcaccacgaggtccgggaccgggtcgaattgcgccgtgtcgtagccttgggtcagctcgataccctgggcctcgagttgcgtactcatgggcggatagacgttggcgtcggagccggtgacgtgatggcccagttctttggccagaaccgccatcgagcccatgaatgtgccgcaaataccgagaatatgaatgtgcatagtcgacctcgtaaaacatcgaggcaggttagcgcagggacggggaaatcgcactctttaggtgagccgcccacgctatgcggcggcttgcctatgccgtgtcgacacctgcgtcagcgcgtcacgtatggcagctattttttctcaattgtgttcagtcgatccgcaacgtccccgttgccttgactcacggagtcttcgtgtttgtacggtttgaagaaaacctcataagcctgtgcaagatcaatggtgagttcctcaagcaactccacgaaagcctccaactgatcgacggcctgcagcggttcgctggaccatttcgggatgtccaccacaacacccggcatcaattgcaaaaacaacttacccaactcactggcgccctgcgttgcagcgtcgacgcgagctcgaagggcagggtcaacgggttcaactgccgggcccaggtctgcaactctacgtcgccggggttaataccgccgtcaggagcagcaggacgctcatagtggttttgaagagctttttgcacctaaatgacagctgccacaatgccagcatcggtcaccgcttccattgcccagcgcttgacctgaccgacaaaagcgcaagcagaggactggacaaagtccttcaatggcgcaccgtatggcgtttgggtcgcagggtcgaaggcataccattttccgttgcgctccacggcaacgacgggaaccgcatcgctattagcgcccaacggcctgtagaggccttggaccccgccttttaaccccggaataaaaaagccaaacacatccagcactaaattgaaaaagccttcagcgggcctgcccttaataaaactttcaaccgcactgtagaaaggaatcaggcttaaaaagaacgccttgacggcctgtgagcgcgcgctttcccgctcttgctctgtgctgccattggccgttgctttcgcctcatccaaacctcgcgtgaaataagcaccgacagcgactgacagttcatcggttttagacgagaaaaaagtcgtcggcggggcgagatgctctccgggtataccggcctccaacgatttggaggtatagatacgataggcggaaaagtccaccgggtcgtttttcggcgatgtactaccgactgcctgccacaggatagtgaccggtggtgctttaccgcccggcgaatcaggcagcgacatggagaagtacaaacgagagcctggaaactgcaggccgggcctggaagggtcggcatccttgatgattcggccctgcgctggtgaatacagataatgacaaaccttcccatcacgttcagccctgataagtaccgcgccgctgcctatatacgcttgaattttatgatcggcgctgacagggccctgattggcactgggcgtctggagagagaatgtcgtgaccttgccgtattcaatcagccgccgatcttcgagcgggagcaatgagagttgatacttaaactgcgcggcaaaaccgtccttgagcccttggatgtatttgtcgaagctttcatcaaactgctgcttgatgtttggcaacttcggaaaacccaaattcactttctcggtattgaagtcagggtggctggatatccagaagtgcttatccagatcacctgacatgtaagtatccagcagcgaataggcttttcggccgggcgaccccggcggaacattcgctagcagcttctgctcaaaaaaagcttcattttcgacgccatacacgcgccgcagctcaacgagcgccaactctcgccgggttggcatcgacgtggacagcgcatcaacggaatcagccaaggttttatactgtgcttgcatggccttcaatgcgctttcgacttcctcgggggtgtacgcatcatcgcttttttcaacaataatgccgttggcaatgccccagtcgataacggccgtcatctgagcgagttgttgctgacgcttttcaagctccgaaacaggcgctttctcatcgagttccatgatctgcgcataggttttcgcatgcgttgatcccgggtgactcgcctcttggcgagccaccgctgcactgaaggaggcccattggtgggaaccatacaccagcgccgagggcagatcgtttacccgaaactcgggggcagacaccgacaacagttgaaaggcgatgattttggcattggcttcgccgaaccgggtggccagacgctcttcaaaacccgtgacaatttgcgcagcgctgaagccccaattacctggctgacgcaacgagtaccctgccagattattacgctccaggcctcctgccgaatccacatccaacaatagcgcgctaagcagtacttcctgcaggctggtagccgtggatactgcgtcgatgctgtcctggagcaacctggccaacgccatgccttctggagaaccgagaatggctttaaggatttttcaggttcccccttaccagaccgtaaaggttcaggaagggtaagccgcaagaattcgattaggctcggcataccgctggcttcatcagttttcgctttcggttgagcggctttccaagtggcaactacctggcgtaatttggcttgggcgtcagccgccaaagggacttctttagtgagtagcccgccataatcagccgtttgtggggactcggcactgcgtcgatatcgtgaggaggggggaaagttatggatttatctggaggagttgcaccgttaaatttgttatctatcggcgaatcggtttgaggataaagcgatatagaacgtgatgaatccagatagttggaaatcatggcgacattctcgaaagctattgcgcgcgacggggcaatctttcataaaagcctgtcacagagactccattcagcgccaggcttactaccaataaccgtctactcaaccttccctttcgacgttgtaaaatcaacattcactgcaaaagccaacaacgatattttgcgcatacccgctcattctttactcgcgcgcttttccattttcagcaagataccagcctgtgccttactcaccctggctattcgttcttcgagtgtattcatgcgactttccagtccgtcaaccccacaggcagcgggttcagcagccagataaggtttgaagaaaacttcatattgatcggcaacgtccttcgtatgttgttcagcgaagtccaacaggttctcaagttggctcatgcgctccagcgggtctttcgaccagttttgatccggcaaaaaacccgtttcggtatccccaaacttgagcaccatcgactgattggccaccgtgaacgcaagcacctgagcctcattcattctcgaatagagcttattgaggtcagtggtcactggcgcctctggacgctcgaccacagacttaccgctgggcgtcggcggaatcatgggttgaggcagatacgacgccttgatttgttcagaagcggcggtagacccggcatatgccccaatgttaattggcgcggacactatccctgttatcccggcactgatcgccgcatcgcgcgcgacatgcgccacagatggcgacgatggaatcacaccagacttgaccattttttcggcattcatcatccgggtcgtggcttccgcaatcgtcattttaggcgtagcagcgggcgcagggactttgttcttccaatcgaggatcttttggttgattttgggcggaagcagttgcacatgaggctcgttattgcccttgacggcgctggactgatcccttgctaccttgccgttcttatcgagcagccttccagtgcgatcaatcagaaagccttctcgattgacgcgctttccatccctatccaccaagtgaccctcagcgctgaccaagcgacccgagtgatcgatcaagcggccctgggggtcgacgagctgatttttctcattgacaagcttgccttgggcattgatcaaatgccccttttcattgaccaggcggcccttgttatcgaccgcttgaccgttattattaacccgttgcccatgttcattgatccgctggttattcgaattaatcagatggccttgtttattaatcgcctgccctttgtcattgagcaactgaccttgcttattgaccagccgcccttccttattataataactgcctgaaggcgcgtaatgcggaaccactttagacggccccggcagacgtttagatacgttaaccgcgggtggtttgattgtcggcatatagccacctcatcatgaacggacattaaatccaatagcgaaaccttatggcttctgttcattacgtggtcaccggtaaaaaatagttccttccggcctgcacccacactgcctattagataaagcgccccacccgagcctaaagaccgccataaaaacttcagagcacgctcacattaactagataccaccgcacgccgttgaattttatatttgcgcaacttcctataaagagtattacgacttattcccagcgcttgcgccgtgcacgtcatatgccagtgctgttgctccaatgccgccagcaacgtctggcgctcggcattatcgaggagtggctcgttggtgtgttgaacaggggtgtattgcaccatatcaggcagatccaacaaccctatccacccgtcttcgctgagtgccaccagtgtgcgcaataccgtgcgcaactgacggacattgcccggccaggcgaaggccagcaatgcctcgcgcgctgcgggctccacactgaccgattgctcaccggcctcctccctcagcaggaagtccagcagttgcgacttgtcgctgcgttcacgtaacgccggcaagccaatttccaggccgttaagtcggtaatacaggtcttcgcggaagctgccagcccgcacgcgctcacacaagtttcggtgcgtcgcgctgataatccggacatccacggcttgaggctcgccgccgatggggaccactaggcgatcctccagtacccttaaaagacgggtctgcaaagccagtggcatatcaccgatttcgtcaaggaagagtgtgccaccgtcggcctgttggagcttgccgcgcatgccatccttgagggcaccggtgaaactgcccccacgatagccgaataactcgctttcaatcaggctttccggaatggccgcgcaattgagcgctacaaacgctttaccggcgcgctgactggcgtggtgcacagctttggcgaaggcttctttaccggagccggtctcgccattgatgagcagtggcacatcacgctcaaatacccgcagcgctttgcgaaaatcattttgcatcgccgaatcgcccaggcaaatgctgggcagccgtgaaggctcaggctgggcgatgggggctgacgcgctgcgcgcttgcccacgcaaagcggcgaacagatgccggccatcccgcgtgcgcaagggccaactggccgtggcattcgcactggcgcggccgagcaattgatccagggagcaatcgaaaaatgcctctactggctgccccaacaacccgtcacgccgttgccccaacaagttcaacgcactctggttgaccgcacagatgcgcccttccccatcaaacgccagcaacccttcgctgaacaaccccaccgactccgcctgcagatgaaaacgcagcagccaatggttttcgaaatgacgcaggaagtaacaactctcgatcatcttcgccgacagattgaccagcgccatagtgtggaactggctctgacgcgataccgcttcccgtgcggatgacacatccagcacagccagcagatcgccatggggatcgaacaccgggctcgccgaacaggtcagcccggtatgccggccacggaagtgttcgtcacgatgaatggtcagggattggcgctccaccaggcaggtgccgatgccattggtgccttcgcacgcttcactccaatcggcaccgagccacagcccggcgcgttcgaagatcttgcgctctgatggcgcggtgacacagttgaggatcacgcctcgcgcatcggtcaacagcaccgcatgcccggcgccggacagctgctggtgcaggctgttcatctcactgccggcgatgtgcagcacctgttgcagccgctcgcggctttccagcaaacggccgtgttcaagcacggtgggggcgatggtttgcgcagggtcgaggtggtagtcctccaggcagcgcagccaggagcgggcgatggagggatcgctggacgggtcgcggccatgcgccacggtgagcacttgctgggcatggcgactgaaatgatcgttgtgcatttcttattattctccctgcgtgagaacccccagcatcccccagccatccaggcaatgcaatcccgggccgacccgccggtcacaggctgtaccgtttatggcacaaactgtcactcgggctgtatcgaccctgccacagcaacgccttgcaacaatgcccaaccccttgatttagctggctcacacagcagtggcccaacctttgctctacgcttatcaagcgctcgctgcgctgcgctcccaataaacataaaagccaggagatacccaccatgcgttacgcacaccccggtactgaaggcgccatcgtttcgttcaaggccaagtacggcaactacatcggtggcgagttcgttgcgccggtcgatggcaactatttcaccaacacttcgccggtcaacggcaagccaatcgccgaattcccgcgctctacggccaaagacatcgacaaagccctggacgccgcccacgccgccgccgacgcctggggcaagacctcggcccaggaccgttcgctggtcctgttaaaaatcgccgaccgcatcgaacagaacctcgaactgctggccatcaccgaaacctgggacaacggcaaggccgtgcgtgaaaccctcaacgccgacatcccgctggccgccgaccacttccgctacttcgccggctgcatccgcgcccaggaaggcaccagcgccgaaatcaacgaacacaccgcgtcctatcacttccatgaaccgctgggcgtggttggccagatcatcccgtggaacttcccgatcctgatggctgcgtggaaactcgcgccggccctggccgccggtaactgcgtggtgctcaaacccgccgagcaaaccccgctgggcatcaccgtgctgctggaggtgatcggtgacctgctgccacctggcgtgttgaacgtggttcaaggtttcggcaaagaagccggcgaagccctggccaccagcaagcgcatcgccaagattgccttcaccggctccacgcccgtgggcgcgcacatcatgcatgcggcggccgagaacatcattccgtccacggttgagctgggcggcaagtcgccgaacatcttcttcgccgacatcatgaaagccgaaccgtcctttattgaaaaggccgccgaaggcctggtgctggcgttcttcaaccagggcgaagtgtgcacctgcccttcccgcgcgctggtggaagagtcgatctacgacgacttcatgaaagtagtgatgaagaaaatcgagtcgatcaaacgcggcgacccgctggacaccgacaccatggtcggcgcccaggcgtccgagcagcagttcgacaagatcctgtcctatctggaaatcgccaagggcgaaggcgcacaactgctcaccggcggcaaggtcgagaagctgaccggcgacatggccggcggctattacatccagccgaccctgctcaagggcaccaacgaaatgcgcgtgttccaggaagaaatcttcggcccggtggtgagcatcaccaccttcaaggacgaagccgaagccctggcgattgccaacgacaccgagttcggcctcggcgccggtgtgtggacccgcgacatcaaccgcgcctaccgcatgggccgcgcgatcaaggcgggccgtgtgtggaccaactgctaccacctgtatccggcccatgccgcgttcggtggctacaagaagtccggcgttgggcgtgagacgcacaagatgatgttggatcactaccagcagaccaagaacttgctggtgagttacgacatcaatcctcttgggttcttctaactgacaacccgctctcacagttgaaatgcaattaaacatgtgggagcggacttgctcgctcccacatttaaatcttcataagtacttgcgaagtgcattcggcacgaagaggccgagttaaaacaataacaacggaaggtacttttcccatgtctagcgaacctacaagttcttctgtcgacttcgaaaaagtcgactcccaatacttccaacaacgcgaactgaaaaaaggcgccgccggctgggtgctgctggtaggccttggcgttgcctacgtgatttccggcgactacgccggctggaacttcggcctggcccagggtggctggggcggtatgttcctggccacattactgatggccaccatgtacctgtgcatgtgcttttctttggccgagctgtcttccatgatccccaccgccggtggtggctacggcttcgcccgcagtgcattcgggccgtggggtgggttcctcaccggcaccgcgatcctgatcgaatacgccatcgcccccgccgccatcgcggtgtttatcggcgcgtattgcgagtcgctgttcggcattggcggctggatgatttacctggcgttctacatcatctttatcggcatccacatctttggtgtcggtgaagccttgaagttgatgtttgtgattaccgccgtggccgcgattgccttgggtgtattcctggtgtcgatggtgccgcacttcagcatcgccaacctgctggacatcccggtgaccgaggccaagggcgccagtacgttcctgccgttcggctatgtgggtgtgtgggcggcaatcccctatgccatctggtttttcctggccgtcgagggtgtgccgctggccgccgaagaaaccaagaacccgaaacgcgacctgccacgcggcctgattggcgccattgtggtgctgaccagttttgccttgctgatcctggtgatcgcaccgggcggtgccggcacctacgcgttgatcaaatccggcaacccgttggttgaagcgctggcgttgtcctacggtggttcgacctggatgggcagcttcgtcaacctggtgggcctggctgggctgatcgcgagctttttctcgattatctacgcttattcgcggcagatcttcgcgctatcccgagccggctacctgccacgcaaactgtcgcaaaccaacaaaagcaaggcgccagtactggccctggtcatccccggcatcatcggctttggcctgtcgctgaccggccagggtgacctgctgatcctggtggcagtgttcggtgcaaccatttcctacgtgctgatgatggccgcgcacatcaccctgcgcatccgccgccccaaaatggaccgcccgtaccgcacgccgggcggcatctttacctcgggtgttgcactcgtgctggcctgcgtggccgtggtggcgggctttctggtggatccacgggtggtgattggcgcagcgatcatctatggagtattaattgcttactttgctttctacagccggcatcacttggtagcgggcacgcccgaagaggaattcgcggcgatccaggccgcagaggccgccttgcactgatagccgtaaacctcgacgcaggcacgtgcctgcgtcgccaaggagacactgtatggcaagtttttcccacgcggtgggtgcacagacctaccgcttcgacagcctcaaggacgtgatggccaaggccagccccgcacgctccggggactttctcgctggcgtcgccgcacagaacgacggtgagcgggtggccgcgcagatggcgttggcgaatatcccgctgaaacacttcctcgaagaagtgctgattccctacgaaagcgatgaagtcacccggctgatcatcgacacccacgataaacaggcgtttaccgccgtcagccacctgaccgtcggcggcctgcgcgactggctgctcagcgacgcagccgatgaacattccctacgcgccttagcgccagggctgacaccggaaatggccgctgccgtatcgaagatcatgcgcgtgcaggacctggtactggtcgcgcagaagatccgcgtggtcacgcagtttcgcggcaccatgggcctgcgcgggcgcttatccacgcggctgcagcccaaccaccctacggacgaaccggccggcatcgccgcgagcattctcgatggcctgctgtacggcaacggcgacgccatgatcggcatcaacccagccaccgacagcatcgcctcgatctgcgccatgctggagatgctcgacgcgatcatccaacgctatgaaatccccacccaggcctgcgtgctgacccacgtcaccacctccatcgaggcgatcaaccgtggcgtgccgctggacctggtgttccagtcgattgccggcaccgaggccgccaacgccagcttcggtatcagcctgagcgtgctgcaggaaggttacgaagcgggcctgagcctcaatcgcggcaccttgggccagaacctgatgtacttcgaaaccggccagggcagcgccttgtcggccaacgcgcactttggcgtcgaccagcaaacctgcgaaacccgggcctacgccgtggcccgacatttcaaaccgtttttggtgaataccgttgtaggttttatcggccccgaatacctgtacaacggcaagcagatcatccgcgccggcctcgaagaccacttctgcggcaagctgctcggcgtgccgatgggctgtgacatctgctacaccaaccacgccgaagccgaccaggacgacatggacaccctgctgaccctgctgggcgtggccgggatcaacttcatcatgggcatccccggctccgacgacatcatgctcaactaccagaccacttcgtttcacgacgccttgtacgcccgccagaccctgggtttgaaaccggcgccggagtttgagcagtggctggcgaaaatgggcatctttacgcaagccgacggcaaggtgcacttcggcaacagcctgccaccggcgtttcgccaagccttggcgcaattgggatgaaggagccgcctgtgcaactcgacctgcctgacaacccgtggctggaactgcgccgcctgacgccagcccgtatagctctgggccgcaccggcaccagcatccccactagcgcgcagctggatttccagtttgcccacgcccaggcacgggatgcggtgcatctgcccttcgaccatgcgggcctgcgcagtcagttggctgaacgcgggcgtgacagcctgttgctgcacagcgccgccactgaccgtcacctgtacctgcaacgcccggacctgggacggcgcctgggcgatgagtcggcccagctgctgcgcgatcatgcatcggccaatcccggcggcgtggacttggcggtggtggtagccgatggcctgtcggcactggcggtgcataaacacaccttgccgtttctgacgcgcctggaggaacagagcagcgcagacggttggtccttgtcgccggtcatcctggtggaacagggccgcgtagcggtggcggatgaagtgggccagttgctcggggccaagatgaccgtcatcctgatcggcgaacggccgggcctcagttcgccggacagcctgggcctgtatttcacctacaaccccaaggtcggcctcaccgacgcctatcgcaactgcatctccaatgtgcgcctggaaggcctgagctacggcatggcggcccaccgcctgctttacttgatgcgagaggcgtgtcgccggcagctgtcgggggtcaatctcaaggacgaggcgcaggtgcagaccatcgaatcggatgacccagacctgatgaaaggcaatttcctgctcagttcaccggatgactgatcgcggcacgattgcgctttttcgcgccattaggcagcatcgagtcacggccgcttgcgtggtcatcccccatttggaagttgaggcctggcatgcggattactcaagcgaccctggaacacctggacctgttgaccccgctgttcgtcaaataccgtgagttctacggggccttgcccttcccggattcgtcacgggcctttctggagaagcgcctgcgccgcaaggagtcggtgatctacctggccctggcggatgatgatgacaagaagctgctggggttttgccagctgtatccgagcttttcgtcgctgtcgctcaagcgggtgtggatcctcaatgacatctatgtggctgaagatgcacgccggcaactggtggcggacaacctgatgcgcacagcgaaaaagatggccaaggagacccacgcggtgcgactgcgggtgtcgactagcagcgacaacgaagtggcgcagaagacctatgagtccattgggtttcgcgaagacacggagttcaagaactacgtgttgccgatcagcgaagattgatcgcggtagaccaaacacctcaaatctactgtgggagggggcttgcccccgatagcagtgtgccagtcagccaatttgtaactggcattgcctcatcgggggcaagccccctcccacatttagccctgcagcgcttgcaagcccgagtaccacgacatccttcgctacaaaaccaacacgcttttcacctctcaatccgtataatgcggacctttcagggttgtaagaaatgcggcatacacttgtagccttattacccgagcttccgcacaggcctgctgagccgggccatccacacaggtgccatccatggatttcaacccgctcgaccttatcctgcatctcgacgtctacctcgacctgctggtaaccaattacggtccgtggatctacgccattctgttcctggtcatcttttgcgaaaccggcctggtggtcatgccattcctgccgggtgactcgttgctgttcatcgctggcgcagtcgctgcgggcggcggcatggacccggtgctgctggcgggcctgctgatgctggcggcgatcctcggcgacagcaccaactatgtgatcgggcgaacggccggggagcgcttgttcagcaacccgaattcgaagatcttccgccgcgactacctgcaaaagacccacgacttctacgacaagcacggcggcaaaaccgtaacattggcgcgcttcctgccgatcctgcgcaccttcgcgccgttcgtggccggcatcgcaaaaatgccctacccgcgcttcttcggcttcagcgtattcggcaccatcctctgggtcggcggcctggtgaccctgggctacttcttcggcaacgtgccgttcatcaagaaaaacctgtcgctgctggtggtgttcatcatcctgctgtcgctggtgccgatgatcattggtgtgttccgcagccggtttggccgcacctcctccgaagccaagccgcagtaacctgcgatgtggtccctcagcgcctggcgtcgccagcgcttgctggccaagcacccgattgccgatgacacctggcaacgggtgcgccaccacctgaccttcctcgacggcctcaccgccgagcaggaccagtggctgcgcgaagcctgcgtactgttcctcgccgaaaaacacctgaccgccctgcccggcgtcgaactgcaccaggaacaacgcctgctgctcgccgcccaggcgcaactgccgctgatgaacctgggcgacctcgactggtaccagggtttccacgaaatcgtgctgtaccccgacgacttcctcagcccccagcgccaccgcgacagcagcggcgtcgaacacgaatgggacggcgagcacagcggcgaagcctggcaacaaggcccagtgatcctggcctggcccggcgtgctggccagcggtcagtgggaaggctacaacctggtcatccacgaactggcccacaagctcgacatgctcaacggcgacgccaacggcctgccaccgctgcaccacgacatgcgcgtgcaggaatgggccagcgtgatgcagagcgcctacgacgacctcaatcgccaactcgatgccaacccggacgccgagaccgagatcgacccctacgccgccgaaaaccctgctgaattctttgccgtcaccagtgaatattttttcagcgccccggatttactggtcagccgttatccacaggtgtacgcccaactcagccgcttttatcgccaggatcccctggcccgcctcacccaactgcaagccagcgacccgcgctatcagccacagggcgaatgaccgtacgacgtctggcgcatggcatcggcgtcagaatgtgcctataatcgccgccacttttaggccaatccggccatgtttcatggccaattaacgggggcaacgcccaatgagctacagcaagattccggctggcaaagacctgccgaacgacatctacgtcgccatcgagattccggccaaccacgcgccgatcaaatacgaaatcgacaaagacagcgactgcctgttcgttgaccgtttcatggccaccccgatgttctacccggccaactacggtttcatccccaacaccctggctgacgatggtgaccccctcgacgtgctggtggtaaccccttacccggtgaccccaggctcggttatccgtgctcgcccggtcggcatcctgaacatgaccgacgacggcggcggcgacgccaaagtgatcgcggttccacacgacaagctgtcccagctctacgtggacgtgaaggaatacaccgacctgccgcccctgttgctggagcagatcaagcacttcttcgagaactacaaagatctcgaaaaaggcaaatgggtgaagatcgacggttggggcaacgcagacgccgcccgcgccgagatcctgaagtcggttgccgcctacaaaggctgatacccgctcctcattgcctcggcaattgaaaaagccccgatcattcggggctttttttgtgggaaaaattaaacagcaagttcaatactttataaacaacgtttaacttaaaacgaaatccgaagtatcaggctacaactaagcaaaaccctacaagcgcaactcaacgcatggtttatttgatctgtaattccggccagtaaactctgcgtttatgaatacatcaggtgatcgtttaaaagcgctactacgggaagttcatctttccgcctccgacttcgccaagaaccgcggtgtcacgccccagcacgtgaacaactggttcaagcgcggtgtacccatgggccgactcaacgagatcgcagaactgctgtgcatctccagccgttggctgcgcaccggcgaaggccccaaacacccaccggccaacttcctgctggaaggcccgagctcacgaaaaggactgcccaccacccgcgaagccagcggcaaatacctcacaggccccgcctgcctcccggaaaaaaccgacgtggagatcgacctccacccctcattcacctctaccgaatgcatccgcatcacccttcacaccctccaggccctcaacgtaaaacccgaccgcgccctgggcgcctacatggtcgacaacagcatgatcgacatcatccaacaaggcgccaccctcgccatcgaccgaggccgcacccaaatcatcgacggcgaaatctacgcggtagaacacgacggcatgctgcgcatcaaatacctctacaaccgacctgggggcggtttgcgcatgcgcagccacaatgccggcgagcacccagacgaatacctcacctacgagcagcgcttcgagcagaacttccagattgtgggttgggtgttctggtggtccaccctgaataaccgccgcccgcccgtgccgctggatgagcatttattgggctgggaaggctctaaatcggatccggaggtgggcaactgaggtgaatgtgggtatcatgcggcccacatttggcaggggggtggttttgcgctatccaccttgcctggcgaagcggaggagttcccgcggatgcccctactattcagccagacgagatgtgggctgagcgatttgaaggctggtgaggcttgtcaaaaacaagctgaagcagtccccgagaagccggccacaagccggctttttaatgtccgtaaatccccctagtgaattgtccaacaagctgttggacaattgaatgaccaaaagcgggcggctcacagcccctcattccggctatctcttccagatccagataacgagaatttgaggctgctacacagcccaacgcggggcaagcccgctcgccacaagacgctcaatcaagtatcaagtgcggcaaaaaccgactcgaatccttcgtgatcaaactattatcctcccgcaccccaatccccgccgcctggtccccgatcacccaagacccaatcaacgtatagctgtccccgaaccgtggcagcggtgcaaactcctgaagaataaacggcgcatccgtataagggccgtcctccttcacgatcaggccgtcagccgtttgcaattcaatattcgccccttcccgcgaaaaaaacggcttacgcacccagccctttggcacagctttacccggctcagtatccaggtgcgacgccagcaaattcggatgccctttgttgaactcccacaacaacggcaggatgcctttgttggaaagaatggccttccacgcaggctcgaaaaactgcgtgtcgcactgggcaatcgccgcaccaaagggctcgtgaaagatgaattcccaggcgtgtagtttgaacaggtggggaatccagcgatcttcgaggtcaacgaagcgaccttctgcggtcaggccgatgtcttcgatgtcgatgtggcgtgattcgataccgactttttctgcgacgaggcgcaggtagtcggtggtgcctttgtcttcgaccgagtctttcatggaggcgaagtagaagggctggctgacctgcagttgggcgaaggcctggtgcagtttggtgtcgatgctgttgaattggtcagcgtgcttgggcagcaggccgcgttcgatgcattgttccagccagccccattggaacgccgcggcttcgtagaggctggtgggggtgtcgtagttgagttcgagcagcttggcggggccggtgccgttgtaggagaagtccatgcgcccatagaggtgcgggtggccttcgagccatgaggtgcggatcatgtcgtagaacggcgcggggatgctcaggcggtcgagcagttcttcgctgtggaccacgcgagcgacgaggtccatgcacatgtcatggacctcggtggtcgggtcttcgaggtcgtgctcgatttgcttgagcgtgaactggtagtacgcgctttcgtcccagtagggttcgttgtcgatggtgtggaacagaaagccgaggctgtcggcggtctgtttccagtcatgacgttctgcgcagtggatcttcttcatggcccgtcttccttagctactcgacccgccgccgccccagccgctacgtgcgctggccttgctgccgaagccgccacgggaggtggccgacgccacggagctcgacttgctgggcgtgcgcagcgtgttggtgtaattgctgctgccgtagcgggcctggttggaacggccgaaggtggcgccattggagacgcgctggttgagcgtcgagttgccgtagttgccacgatcatcgcgatagcggtacaccggttcggagcggtagctgttgcgattgttgctcagcatgttgccgatcagcaggccggtcagcaggctgctggtggagaagcctgagccgccactgttcgcttgggagctggcttgagcgttggccgcgtcgacctgggattgtgtcacctggccttcggcggtcagttcgaaaccgcccagccgggggatgaacttgccggtggagtcctgctggcaccagtcggcgacaaagtcggcatcgcaatcggcctggctgtcgtacaccggtgcaatgcggcgatgctcggccatggcggtcatgtaggcgtccgagcagacgtccaccgggagtttttcgtcggcgcactgctggacggactggaagttgtacttcttctgcaggtcgtaggttttttccgtcgggccgcagccggaaatcgccatggcgaccgacgctgccagcgacagctggacgtacttgcttcgtttcatcgggagctccgtgcgcgatcagttctgggtaggcgtcatgcacgcggcattcaacatgccgacgctgatggccacggcggcgacgtagatgccggccgcaagctcgccgttcttgatgcgctgggacgtgcccttgagcaccaggctggtcagcaaaaacgccaacagctggacgacggcggcgatcactgcccacacgacaaagtcgagcacgctgatcgagtaggcaatcacgttgctggccggaatggcgaaaccgacgatggcaccgcccagggcgaccgccgcggagacgttacccgcacgaatcagttcgaattccttgtgcggggtgatgcgggtgtagatgaactggaacagcgcgaacagtacggcggccccgaggatatagatcacaaacccgagcacggcggctttgttcagggagatggagagagcttctagcatgaatggcttccttgtttagagcgcgttcaggtcggttgtgtacagcgaaatgcccagcgaggtgctcaggctgatggtgccttcagcgtcttcttcgacggaaaacagcaggaactcgcgtcgatcggtcaggccggtgtcacgggcatatagcatcgagcggtgctcgacgctgtaggaatcctcggggttgatcacgcgctcgctcatggccaccagttcggtctggccctcctcgctgccccatacgcgcgcgtattcgacgccgtcgtgggtgtaggtcggcaacccgatcaggctctgcggccccgccagccgacgcagttcggcttcactactgatggtgatgtaactgaggtagttaaacaggatcaccgactcgacctgcccggcgatgtcacccgtggtgtgcacctgcaaccagtagtcttcgtcgttcatgtagtagcgcgacagccaggtcgactgcccgaggtcgacggtgccgttgctccagatttcctgggagccggggataaccaccgaggtgtgcccatccagcagcaatttcagggtggtgtcgaacatcacgcctttgtccggtgccaggcccagcggcccagtggtcggcagggcttcggcggcggcgtggttcggttgtgggttcgcgttcggggcctcgagccccatcaactgtttaaaccatcccattggagatttccttgaggcgggtggaggcgatgtagaagagttcgccaccctcaacgcgcgtggcgctgggcgggttgatcgacggttgctgggcgcccttggcgcgataaccgataagggtggcgttgtgatgttctttcatccgggtgtacaggtcgccgaacgtggcttcaaaggcctcgggcaatttcatcaggtattgggtggcgccctgccccacgcacagcagctcattgatgaccaccgacgagcccgggtcctgggaggcacgcaccagcatctcgatggccatgcttgaggtgcattccagacgcggcgcgtaggagctggcgagtgcggcaatttcgctttcattgaagtgcgcgaccacatgcccgacagggttgagttgattcaccgccagcaccgtggccagggtcaggtcgtcagacggggttcgcaccagcacacgctcggcaccgggcacaccggcacgcagcaatagcgccgtggaagacaggctgtcaccgcggataaatgcggccttgcccggcatcgggttttcgtcgagggtgcaatcgcagatgacgatcaggttgtcgttcgaggtttcgtcctgcagcagcaactcgatgacccgctcactggacgcgccttcccagccaatcagcacggtatgcccgaccttgccggtgaaatcacctttgcccttcatgccttttctccatgcatcgatgacgctgctggtggttttgccgatggctgccgtcagcagcgcaatgccgccgagcatgatccaggcggccacgaaaacccgcccggcggaagtctgcggcgcaagatcgccatagccgacggtcagcgtcgtggtgagatagaagtaaacaaatgtggcgaaggcggtgaggtgctgttcgcccagcaccaccaggcccagataagccgtgctcaggtgtacgcccaaggcgatgaccaggcccgcccagccgaagcggtgaaacagggacgaggcgtacatgcgcaacaacagaaaaatcgacattcttgcccctgattccctgggtacttgtcatcgcctggaggcgcaagtgcgttcagccggcattaaacctgctgcgcggcgtagagagaagtaccttggctgcaataaatccggcgaatgcaccaaacagatgcccctcgaatgaaacaccctggcgaggcataaagccaaggaccagtccgccatacagtaccgccacgacagcggccgttatcaggttgctccagctccggtggaaccaggcgcgcgacaacaggtaggcccacaaaccgaagacccaaccactggcccccacgtgcacgccggcaaagccgaacagccagaccagcgagccgcccagcaggatgatgatcgcgctgacggtcacgaaccgattgagcccttcgataatgaccagggtgcccaggatcaaaaaagcaatcaggttcgcgctgaggtgcgcaaacgacccgtgcaaaaacggtgaggcgaggatgccgaacagcccctgcagcgttctcgggaccaggccgaatgccataaggctgtaaccggtcgcgacattgaccagttgcaacgcgaccatgaacagcgccaagcctgcgattgtcttgaaacccttcagggcatccatcctgacctcgacataataagaagggcagacactgcccttcctgcatcgccgttgcttactcggccgacttttgcttcagacgttccagaatcgcattggcactgccttcgttcggcgtgatgccggcttcacgcagcttgcgttccaggtcggtaccggtcgacgcttcggccagttcatcctgggcttgcagttcagcggcacgttgctgctgcttggcctgcagacgattcagcgtaccgacggcggtttccagcttgccgttggccccaccgctggcgatggacgcactgacctgggccttctgtacgctttcgcgcgccttgaccatgtccacttgctggcgcaggcttttgatgcggctttcagccttggtgatgtccttgcgcatgctgtccgcataggcgccgaactcggtggcctgcttgtgctcggcgtcccgctcgctggtcagggtcgagatggcttcggccacttccagggcgaggtcttcacgattggcctgcagggcagccatcgccttggattccaggtccttgatcttggcgtcgtactcgctgacacgatccgtggccagcttgtgcttggccatgatgctgaccagctcacgcttggcattggccagcgcggtgtctgcatcgcgaatttcctgatcgagaatgcgcagggcctgctggtcgacgattgattcgccgacttcgctggcaccgccacgcagcgcggtgaacagtttgctccagatggattgagtcattggatactcccggatacttaattgaagaaacgttcaaaggcttcgctggcgcgttgcacgttgtcgaccagggttttcacctcggtcacgatgttggtcaggctggagtcggagctcaatgcgccgaacatgttgtagaccacctgcccgttcggcatggactcgatgccgatggaggacagcgggaacatttcccggctgcgcagcaccgcatcattgaatttcgcgacatcgttgatggactcgacatcgaccagcacggtgtcgacgatgatctgctcacccaccaccgcgatgtaaatcggcaagccgccgaagtcgttcatctccagcttgatgctcgactcggagccttgaaccagagaaagcgtaatgtcgttggagaccacgtcgtccagggcctgaagcgccgtgaagaggcggtcgatattccagttgttacctgcgctcatgaaattctccgacatgaatgagccagccaggatcggctggcgaagctgtttctccatctgcttgagcaggcttcggttttcgggaagcacccaagtctcgtgtttcacatagccggcggccgccaggcccgcgcgcatctgcttcatgtaaaagctcgatggttttttcgcggacgacttcaagcgctctccctgaaggctggctgaatcggtatcgggcccttcagacgggctcgatggagagctgcttttcatggtgctgacctcgttgtgaaaaactcacgcgtgagaaaatctacaggctatttttgccatgctcaatagctcacgcgtgagatatttttccttacatgttcctgtcacgaaaaagacctgacttattgcccgactcagcattgtcctatccaggttgacggtattacctattccagccgatttatcccccgcagcccacccattaatctgtgcccatgttgaaagcaacgcccaaccaacctgaacaaaaaaggattcaaccatgagcactgcaacctacaaccgcctcaacaaagacgacgccattgttctgctggtcgaccaccagaccggcctgatttccctggtgcaggacttctcgcccaacgagttcaagaacaacgtgctcgccctggctgacctggccaagttcttcaacctgccgaccatcctcaccaccagcttcgaacaaggcccgaatggcccgctggtgccggaactgaaagagatgttcccggacgcgccgtacatcgcccgccctggccagatcaatgcgtgggacaacgaagacttcgtcaaggcaatcaaggccaccggccgcaagcaaatcatcattgctggcgtggtcaccgatgtgtgcgtagccttcccgaccttgtcggcgctggcggaagggtttgatgtgttcgtggtgaccgatgcgtcgggcacgttcaacaccacggtgcagcaggcggcgtggagccggatgacccaggcgggtgcgcagatgatgaactggttctcggtggcctgtgagctgcaccgcgactggcgcaacgatatcgaaggcctgggaaatctgttgtcccagcgcattcctaactatcgcaatttgatgaatgggtatgcggcgctgacggcccatcagaagtaactcaaccgaacgtcgccctaagcctgccctgaaaagcaggcttttgttgctgtgtgcaggccacagggcaattatcgccagttctacctaaagaccctgcaagggctgactcttaaaccggtgccccgaccaacagttgtccggctacacggtccagcactgcaaatgcctcttcacgcttttcaacagacattccagcaatattgcgtagcttccattgcaccgccggtagcttatcaataccgtccagggccagcagctcccaatcaggctttgcacgcttaagtgaaagcaaaaaagcagcatcttgcgcacaaaactgctgccgtatcgcctcaagcaacccatgccgggtactctccaactgttcaagcgtgacaggctcacgggtcatgccggcaaactccgcttggaatatgcccgcgagcggtttccaccgtggcgcaagcagctcgctcatcggcctccgatgactgatcaagtacaccagaaaaccctcgaagatttcccgcgtcagcccctcctcgcggagcatcagcatcacgtcaaaaagatcccggggatgctgtcgatccagcgcagcgcaaatcttgccaccatacaaatcgggcaacgagaccacagggatagaagcgaacccgaattgatcttcaaccaacgccacgacatcacgctcttgcggcgcatgaacagtgccccgcatcacaggcgaaacttcgatcttgatttgagcaaacgggctgcgtaccagcactcgcagttcatcgtctcgatttgcttggaccgtcgcaccgacgcgaggtaagccttgcgcaaccgcatccgcgatgcgttggagcgccagacggacatcgcctaatgcctgttggcgatcagaacttggcaggtacgccaggtctatgtccaccgacagacgagggagatcacgtatgaacagattgatggccgtcccccctttcagggcaaaacaccgctctgccgctacgtgagggatgacctggaccaacaatcgaacctgagcggcataacgagcatcaagcgccattggcaaaactctccggcacggtgattaggaactctttatcgagtcgaccaccccggatgagttggcgtttgcctttacctagatcgatgctggaaagatctattcgctcataccacacgtgtcgcgcgtttcgcgccagcaggaggaaaacacgtttgacgcgaatcgagttgcacgcttcaagcaacttctgcaggcgcctggggctcagtgagcccaaaccgctgaacacatcagcgacatgactgaagagcatctcgtcggcggcttgatgaataagctcaagtacggcgcgttccggggttgcgatttttaactcaaatcggctgtaagggacctgtaaaacttgtaacgccatatcttccatttccgcgaaaagtccaccgggatagaagttcacgtcgacgtcccaagggtacttgcggaaccagcccgcaagcacagcgcccggtgttccgaacagatcgacagcctgctttccaaaggcgaggtaatggctgtagccgagtaaactcaacgccgtcgcgccgcccggccaaatatgtaccgatgcattttgctgcaaagcgaataccccgccctgccaatccagatcatcgccgcagcgtttccacgcgccatggcccacccgctcgacccaaccactgcgctgatacttttggatcaggctggggccgacgccatggctatgcagccaggcttgcgtcgcaatggaacccggtggccaatcagccagcaggcggtttattttcatgataaataagcacctataaggtcatgtttttcataaatactaaaccatcctcgagatgatttctgcgataaaccatagataaacaatcgtctcctttgagttgacggtattacctattccagccgatttatcacccgcagcccacccattaatctgtgtccatgttgaacgcaacgcccaacccccccaaacaaaaaaggattcaaccatgagcactgcaacctacaaccgcttgaacaaagacgacgccgtagtcctgctggtcgaccaccagaccggcctgatttccctggtgcaggacttctcgcccaacgagttcaagaacaacgtgctcgccctggctgacctggccaagttcttcaacctgccgaccatcctcaccaccagcttcgaacaaggcccgaatggcccgctggtgccggaactgaaagagatgttcccggacgcgccgtacatcgcccgccctggccagatcaatgcgtgggacaacgaagacttcgttaaggcgatcaaagccaccggccgcaagcaaatcatcattgctggcgtggtcaccgatgtgtgcgtagccttcccgaccttgtcggcgctggcggaagggtttgaggtgtttgtggtgaccgatgcgtcgggcacgttcaacaccacggtgcaacaagcggcgtggagccggatgacgcaagccggagcacagatgatgaactggttctcggtggcctgtgagctgcaccgcgactggcgcaacgatatcgaaggcctgggaaatctgttgtcccagcgcattcctaactatcgcaacttgatgaatggttatgcggcgctgacggcccatcagaagtaaatcaactgaacgtcgccctaagcctgccctgaaaagcaggcttttgttgctgtgtgcagcacacgcttgactctcccctatacggcaacccctaccctgaaacgccctgttcaggacctcacccatgccaacgcgcatcctggttattctcggccatccatccgcaaacagcttttgctctgccctggccgacacctacacccactcggcaaaaaccgcaggccatgaagtacgcgtcctgcgcctgggcggcctggcttacgatcccgtcctgcgccatggctacaaccagttccaacccctggagcccgacctgctcagcgcccaatccgacatcctctgggccacccacctgacattcgttttcccaatctggtggggcagcatccccgccttgatgaagggctttatcgaccgcgttttcctacccggttttgccttcaagtaccaaaccggcaaggcgtttcccgacaaactcctgagtggccggaccgctcacctgttggtgaccctggacacgccgccgtggtattaccgctggttctaccgcatgcccggcatccaccagatacgcaagaccacgctgggattgtgtggggtcaagacaacccaaacattgctgttggggccggtgctgggatctactgccgcgcagcgggaccggtggctggaacaggccggcgctttaatcggaaaagggagttttcatgtacatcggcaaagccgcgcagttgtcgggcaccaccatcaaggcgattcgtcactatgaagcaatcgggctgctgccggcgccgcagcgtcagggccagtaccgggtttattcggcgcagagcgtcgagttgctgttgtttatcaagtgcgcacagcagttggggttcaagctcaaggagctgcaagaaattcttcgagaccacgctggcggtacattaccttgggatcgggcggatcaggccatcgctgacaaaaaacacgcgctggccatgcagattacgacgctgcaacagatgcaagcagggctgcttgagttcgaaggccagttaaaagatgcacatggccgctgctctcaactggtgaccgcgccgcgctaagtggacgatgagccgaatagaatgcacaatcggctcatccaatgagccgaataaatgtggtattcggctcactcatcaggtattcgcccatgaatcatcctttctggatctggcaacaggccggctggccgcacttccactggcaaccgggacgcctggccgtcgtgctgcgtgagtgcgggcacgcgcagggtcggctaatgggcatgctcggcaccgtcagccaggcggtcagtgcacagaatgagctggatgccttgctgcaaaacatcctgacttcttcggcaatcgagggagagcaactgagtgtcggctcggtgcgctcgtcactggcacgacgcatgggcctggaggcgatgaaagacggtcaggtcagccgtcgcagcgaggggctcgcagagctgatgatggatgccacgcaacaatttgcccaacccttcaccctcgctcgcctattgaattggcaccacttgctattccctgctcagcatgaaggctttgctgcgcgcgcgctgaacatcggggcgttgcgcggggatgagccgatgcaggtggtatcggggcgacttgatcgaccaacggttcatttcgaggcgccgccgcgcaaaggcctggaacacgcgctcggtgagtttctggaatggttcgaaaccagccgcaaccaaccggaactggacccactggtccgcgccggcgtggcacatttctggtttgtcaccctgcaccccttcgatgacggcaatggtcgtctgacgcgtgccatcaccgatttggcgctggcccaaggcgagcatcaagctatccgcttttacgccatgtcggccagcatcctcgaagaccgcgctggctattacagcgcgctggaatccagccagaaggccacgctggatatcaccgactggctggaatggttcctcaagaccctgctgcgcagcctgcagcaagccatggtgcgtattgaccgggtattggacaaaagccggttctggcagcagcaccgcgacctcgcgttgtctgccgaacagatcaaggtgctcaaccgcctgctcgatggcgatgaaaagggttttgagcacggtatcagcgcggcgcagtaccaagcagtggcaaaggtgtccaaggccacggcgacgcgtcatctagctgatttgctggaaaagaactgcctgatccgactccccggaggcggccgcagcacgcggtatcaagtcaatacagcggacaagtgatacccccgctcatttgcccagaatccccatgtctgctagtgtcccgccggtttaccgtctaccggaatagccgccatggcccgcaaaaaagttgcactcgatttcgaacaatccctcgccgacctgcaatccctggtcgagcggctggagaacggcgagttgtcgctggaagactcgctgacggcgtttgagcaaggcatcggcctgacccgtgactgccagagcgccctggcgcaggcggagcagaaggtgcaggtgttgctggaacgtgacggggagttggccgaagaacctttcgatgcggaacagcccgaatgatcgacgcgtatcaggccagtagccaagcccgggtgaatgcggcgttggaacccttgtttgttgcgccaagccccgaactcaagcgtctttatgaagccatgcgctacagcgtgatgaatggcggcaagcgcgtgcgtccgttgctggcctatgccgcctgcgaagccttgggcgcaagcgccgaacaggccaacggcgcggcctgtgcggtggagttgatccacgcctactccctggtgcatgacgatttgccggcgatggacgacgacgatctgcgtcgcggtcagcccaccacccacaaagccttcgatgaagcctgcgcgatcctcgccggtgacggcctgcaaagcctggcgttcagcgcactgctggacccggcattgagcagcgtgaatgccgagatccgtttgcgcatggtcaccgccctggccgtggcggcaggcccggccggcatggtcggcggccaggccatcgacctcggctcggtcggccagaagcttgatcaacaggcgctggaatacatgcaccgccacaagaccggtgccctgatcgaagccgccgtacacctgggagcacttgccagcgggcgggccgacgccgctcagttggccgcgctgaagacctacgcgcgggccatcggcctggccttccaagtgcaggacgacattctcgacgtcgaaagtgacaccgccaccctgggcaaacgccaaggcgccgatatcgctcgggacaaaccgacttatcctgcgctgctcgggctggaagccgccaaggcctatgccctggaactgcgcgaccaggccctggatgccctgcgacctttcgacgcggcggccgagccactgcgtgacttggcgcggtatatcgtcgaacgccggcactgataacggcggcctttagggccgcatatcggccaagttcggcgctctgcgtgggcagtttgcgatgcttgaggtaaactgccgcctcttctatacctataacgattcgcctgatgcccacgacgtttcaagagattccccgcaagcgcccgtccacgcccctgctcgaccgtgctgtcacgccggccggcctgcgtcgactcggtgaagccgagctggaaaccctggccgatgagttgcgcctggaattgctctacacggtcggccagaccggtgggcattttggtgctggcctgggcgtcatcgagctgaccatcgccctgcattacgtgttcgacaccccggacgaccggctggtgtgggacgtgggccatcaggcgtatccgcataaaatcctcacgggccgccgcgagcaaatgggcaccctgcgccagaaggacggcattgccgcttttccgcgccgcgccgagagcgagtacgacacctttggcgtcggccactccagcacctccatcagtgcagcgctgggcatggcgattgccgcccgcctgcaaggcagcgaccgcaaggcaattgccgtgatcggtgatggcgcgctgaccgccggcatggccttcgaagcgctgaaccatgcgcctgaagtggacgccaacatgctggtgatcctcaacgacaatgacatgtcgatctcgcgtaacgtcggcggcctgtcgaactacctggccaagatcctctccagccgcacctacgccagcatgcgtgaaggcagcaagaaggtgctctcgcgtctgcccggcgcgtgggaaattgcccggcgcaccgaagaatatgccaagggcatgctggtgcccggcacgctgttcgaagaactgggctggaactacatcggccccatcgacggccacgatctgccgaccctgatcgccacgctgcgcaacatgcgcgacctcaagggcccgcagttcctgcatatcgtcaccaagaaaggcaaaggcttcgccccggcggaagtcgacccgatcggctatcacgccatcaccaagctggaacccctggacgctcctgccgccgcgccgaaaaaggccagcgggccgaagtactccggtgtgttcggcgaatggctgtgcgacatggccgccgccgatccgcgcttggtgggcattaccccggcgatgaaggaaggctccgacctggtggcgttcagcgagcggttcccgctgcgctacttcgacgtggcgattgccgagcagcacgccgtgactttcgcggccggcatggcctgtgaaggcgccaagccggtggtggcgatttactccaccttcctgcagcgcggctacgaccagttggtgcatgacgtggcggtgcagaacctcgacgtgctgttcgccatcgaccgcgccggcctggtgggcgaagacggcccgacccacgccggcagctttgacctgtcgtacttgcgttgcatccccggcatgctggtgatgacgccgagtgatgaaaacgaactgcgcaagatgctcagcaccggccacctgtacaacggccctgccgccgtgcgctacccgcgcggcaatggcccgaatgcggtgatcgaaaaggaccttgagcctatcgagatcggcaagggcatcgtgcgtcgccaaggcagcaaggccgccttcctggtgttcggcgtgcaattggccgaagcactgaacgtcgccgagaagatcgacgccactgtggtcgacatgcgcttcgtcaaacccctggatgaagccctggtgcgcgagattgccggcaaccatgagctgctggtgaccgttgaagaaaacgccatcatgggcggcgccggtgcggcggtcagcgagttcctggcgcgggagaatatcctcaagtcggtgctgcacctgggcttgccggatgcgtacgtcgaacatgccaaaccggcgcagatgctggcggagtgtgggttggacgaggccggcattgaggcatcggtgcgcgagcgcatggcgttgctcggcctgtagaaaccggatcaaaaggtgggagggggcttgcccctgatagcggtggctcagtcaaaattatgctgactgacacgacgccatcgggggcaagccccctcccacatttgatttgtgccaccttcaaatgccatggacagctcatgaatcgccttcgcctcaccctgtccctgttactgttgacctccccggaactactcgccgacacccgcgacgatgcgctgaaacttcccaacgtggtcatcagcgccaaccgccaggtccaggcgcgcaacgacagcagcgccgccaacaccgtgttcacccgcgacgacatcgaccgcctgcaacccaccagcctcaccgacctgctaagccgtgtgcccggcatgcaaatagcgcccaccggtggccgtggcagcttgcccggggtctatatacgtggcaccaaatccgcacaaagcctggtgttggtggacggccagcgcattgccaataccacctccggcgacagcggcctgcaatatctgaacgtcgaccagatcgagcgggtcgaagtactgcgcggctcacgttcggtgatctacggcagcgatgcgattggcggggtgatccaggtgttcacccggcgcaatgccgggcagggcctgcaaccacgtctgaagctcgggtttggcagtaataagacctgggagcgcagcctcggcctctccggcggcgatgagtacacgcgtttcaaccttggcgcgagcctggatgaaaccgccggtatcaactcgacgcacacctcgttccccagcgatggcgaccatgatgcctaccgcaaccagtccctcagcctgaacctcagccattcgttcagcgatgcgctggaggtggggttcaacctgttggataaccggggcaagtcggaatacgacaacagcttcggccgctacgacgtcgccaccgggcaaacagcggggcaaaaaccctacaccgattacaccgtgagcagcgccagcggctatgtcgacgccacgctcaacgagcgctggcaatcgcgcctggaactgggccatagcgagaaccgcgacaccaagcgcgacaccctcagtgatgacttcagcgtgttcaacacttaccgcgactcggtcaactggcagaacgacctgacgctgaatgagcagaacagcctgattctcggcggtgactggtacgaagaccgcttccacggctccaccaccctcactgaaaacagccgctggaaccgtgcggcctttgtgcagcatcgcttccatggcgtagggttttccaccgaactgggcctgcggcgtgaccagaaccagcagtttggcgggcagaacagctggagcggcaccctgaccttgccggtcaacccggacaacgacctgctattgagctacagcgagggcttccgtgccccgacattcaatgacctgtattacccggacgagtacggcttcaagaacagcaacccgaacctgaagcccgaaacctcgaaaagctacgaagtgcaatggcgcagccaactcagcgacaccagccgtctggaagcttcgctgtaccgcaccgacatccaggatgcgatcgtgttcgacagcgacggcccgcaaaacgtcagctcagcgcgcatcaacggcttcgaagccgcgctcaagcaagagctgttcggctggcaaggcaacctggggctggcaataattgatccacgagaccgtgattccggacgtacgttggcgcgtcgcgccaggcgcaccgtgagcctggacctggatcgccaattcgaccaattcggcgtcggcgccagctggcaagcggtcagcagcagctacgacgatgcgaagaaccagcaaccgttgggtggctatggattgctcgggctgcgcgccagttggacgctgaaccatgaagtcacactgaacatgaagctcgacaacctgctggacaaagcctacagccgggcgctgtatcagtaccagggccagcaatatggctaccgggaagaaggccgggcgctgatgcttggcgtgacctggacgccggacctctagccgggcgcgatcacttcacacagtcgggccacggcttccagcatctgcccgctgggccgctccaggcctttatccggcaccagccgtacccgctcagccatcgtcggccagaccttccaggcgtccttctgcgcctggtcgcccaccagaatcatctccggatcacgctgcaacaccgactcgatgctcacctgcggcgccggcagcttgagatcatcaaacacattgcgcgcgccgcacacccttaacgcatcgctgatgatctgcccgccacccacggtgtacagcggctgattccatacctggtaaaacacgcgcaatggctcggcgcgctgatagcgctgacgcagctcggccaggcgttggcgcaactgcgcggccaactgtcgacccgcgtcagcgcgacccaattgctcggcaatggcctggacctgggtggtgagctgttcaaggctatggggttcggcgacgtacaccgggatattcaggcgctgtaactgctcacgctgggccgggccgacactgccgggccacagcaggatcaggtcgggcttgaggctgagcaggcgctccatgtccaactgaccgtattgccccactgatgtcacttgcaccaacgctgccgggcgttcgccgccgtcgagcacgccgaccagcacatcggctgcgcccagttcgaccacgatttcagagagggacggcgccaggctcaccacacgctcggccgccagcgcctgggcactgaataccagcaacactgccagccagtgacgaatcatcccagttggcggggaatgcggtagaggtagaacagcaccacggtggacagcgccaacaggaacagcggcaccgcttccaacccgacgaagaccgacaacgcgccgatccaggccggtacggccgcaaccagcaacgccgtgcgccgacgggccgccagggtgatccaggcagcgggttcttcgggggtatcgagggctttggaggtggcgatcaacgcgtgtttatagccgttgaagtagcgcaggctgaggaacatcgaggccacaccggcaatgaagaacggcatggccagcaccgggagcaaggattcggcctggccgaacaccaggttgagcacaaacagggggagcagcgccagggccaggtactgccaccaattgaaggacagtcgccgtttcacctggcctcgggtcacgcgcggtcgacctcgccctggtgctcgttgcccatcatgtggtcgagcttgctggccttggtggccaggtagagtttgttatgcgggttgtgcccggtgtgcagtggcacacgctcggccacggtgatgcccatctcggtcaaggctttgaccttgcgcgggttgttggtcatcaggcgcagggatttgacgcccaggtgctcaagcatcggcaggcagatcgcgtagtcacgctggtcggcggcaaagcccaggcgctcgttggcctcgacggtatcggcgccaccatcttgcaactcgtaggcgcggatcttgttcatcaggccaatgccacgaccttcctggcgcaggtacagcagcacgccacggccctcacgggcgatcgcgcgcatggcggcttccagttgcgaaccgcagtcgcaacgctggctgaacaacgcatcaccggtcaggcattcggagtgcacccggccgagcaccggcgcgccatcggcgatatcgcccaggctgagcacgacatgctcgcgcccggtggcttcttcgaggaagccgttcatggtgaacgtggcaaaaggggtaggcagcttggaagcggcgacgaaaacgacgggcaccgtgtgctcctgatttcagtttttacagaggcggctattgtaacagcaggttcctacagacgcttaagctgaattatcactgataaagatcaatgggttcgattggccttcatcctggttctatgcaggtcagaacggatagggttgtttccagcgctcgaatatcggctttaactcaccgcttttcaccagggccgccatgcgctggtcaaagaccgccatcaagccccggccccgctcgttatcggcaaacccgatgtacaacggcagttcggcaatcggcgtcagcgtgaacttcgacgggtcatcggcctgattgagcacgtacttggcctcggtcaacgcatctatatagaagtccgcacggccgtgttgcagcatcggcaaaatgccgtcgcgacgctcgacctggttgaaacggtgcacattgggcaagtattcctcgtacttgtagccacgcacccaggccaggcggtaattgcccagcgtagccgccgtcggcgccggcgtgctggccagcccgagggcgtagatgtggtcggaatcgaagttccagtgggggtacaacacgcctttggcttcatcgcggtaggagccgacccagccatccacctcgccgcgttgggccaggccgaccgagcgggtgtagggcacggagcgggtctgcaatttgatgccggcgggctcgaagacctgacgcaacacgtcccaggccaggcccgtgccgtctttgttggtgtagtcgttccactcctcactggccagcatgatcttgccaggcacgtcctgcgcctggaccacgcccgtaaaggcacacagcattatcagcagccagcggcgcacatccatggtgacgacctcctacagggccttgcatccttgataacgctatagagggtagcgcaggtcgccgattcagggcgcctcgcgaaaatgctgataaccacggatggccggcgtgatgtcctgcccgctgccatcgagcaacgttacgccctgccctgcctcgacccggccgatcacatggatcggccaactatcggccagcaacggcgccagttcggcggatggcagggtgaacgccagcacgtagtcatcccccccactcagggccgccacgcgtgctgcatcatcgccaacaaacgccagcagcgcctgggacaatggcaaccgctcgcgttcgatcaacaggctgacctttgacgccatcgcgatatgcccgcaatcggccaggagcccgtcggaaatatccatcgcagacgtcgccttgccacgcagcgccagacccagggccaactgcggttgcggcgaccagtaatgagcgagcaagggctcggcgatggctgtgtcggcgcagcgctggcccaataccagtggcaaggcaccggcggcattgcccaattcgccgccgacacacagcaggtcacccggctgcgcaccgctgcgggtcaaggcttgcccggccggtacacgaccaaacaccgtcagggtcaggctcagagggccacgggtggtatcgccgcccaccaggcccacgccgcagcgttgcgccatgaggttcaaaccctgggcatagcgttgcagccaatcggcatcgacggttggtgtggtcaaggcaagggtaaatgcgagggggttggcgcccatggccgccaggtcgctcaccgccacggccaacgagcgttggcccagcaggaacgggtcacaggggtcggcaaaatgcaccccggcgaccaaggtatccgtggagattgccaactgctccccagcggggagcgccagcaaggcgcagtcatcgccgatccccagggctataccttcgccgccctgcgcacagggcgcggcggcgaagtagttgcggatcagctcaaactcgcccattcaggtttcaagcgcgattcagcgcttgtacgccttcacttcggcttcacgcaggcgcggggccagcttgtcgagcacgccgttgacgaacttgtggccgtcggtcgaaccgtagactttcgccagttcgataccttcgttgatcaccacgcggtacggcacatcgacgcgatacagcagttcccaggccgacaggcgcattacgcacagctcaaccgggtccagctcttcgatggtcaggtccaggcaaggcgccagggcggtgtcgatctcgctcaggtgcgcgtgcacaccgtgcaggatgtcgtggaagtacggcaggtccgcgaaagtgaaatcgttgtcgacgcgaaactgtgcttcgatctcgttcaacgacgcgcccgccaggtgacgctgatacaacgcctgggtcgccaactgacgagcagcgcgacgcttctcgttcttcgacggtttgccagcatcggctggacgtggctcgcgcgggttgaagttgtcgctctcgtcggaaatcacttggcctccaactgcgacagcaggctgaccatttccagggcagacagggcagcttcagcgcctttgttgccggccttggtgccggaacgctcgatggcttgctcgatagaatccacggtcagcacgccgaacgcaaccggtacgccgaactccatggacacctgggccaggcccttggtgcattcgccagccacgtattcgaagtgcggagtaccgccacgaatgaccgcgcccagggcgatgatcgccgcgtattcaccccgttgagcaactttatgcgcaaccagtggaatttcgaaggcgccaggggcacggataagggtgatgtcgctttcgctaacaccgtggcgaaccagggcgtcaacggcaccgcttaccaggctttcaaccacgaagctgttgaagcggccaaccaccagggcatagcggcctttgggggcgatgaaggtaccttcgatggtcttcagggtcattcgacaaatctcttaaagagccgggacgcgtgtatgacgcgtcccttagtgatatttgaaccgcgaacaaggggcgaaaatcgccggcctttattcggagggcacgtattctactacttccaggtcgaaaccggatatcgcattaaatttcatcggtgcgctcatcaggcgcattttgcgcacgcccaggtcacgcaggatctgcgaaccggcaccgacgatgctgtaggtggtcggttttttcaccggcgcgtgatccgccgtttcgcggatatgcgccagcagcacatcgccatccaacgggtgcccgagcaacagcaccacaccgctgcctgcctcggagaccgcagccatagcggcgcgcaggctccagcggcccggctgcttgaccatcagcaggtcgcgcagagggtccatgttatgcacgcgcaccagggtcggctcttcggcgcagatgttgcccagggtcagggccatgtgcacatcgccttccaccgaatcacggtaggtcaccaaattgaattggcccagttcactgtccagtggctgctcggcaatccgctgaacggtacgttcgtggatcatgcggtagtgaatcaggtcggcaatggtgcccactttgatgttgtgttcggcggcaaaggcttcgagttcggcacgacgggccatggtgccgtcgtcgttcatcacttcgcagatcacgccgcttggctcgaaaccggccatgcgcgccaggtcgcaggcggcctcggtgtggccggcacgggccagggtgccacccggttgggccatcagcgggaagatgtggccggggctcacgatgtcttcggccttggcatctttcgcggcggcggcttgtaccgtacgggcgcggtcggcggcggaaatcccggtggtgacgccggtagtggcttcaatcgatacggtgaacttggtgccaaagcccgagccattgcgcggcgccatcaacggcagcttgagcaactcgcagcgctcacggctcatgggcatgcagatcagcccacgggcgtgcttggccatgaagttgatgtgctcaggcttgcaggcctcggcggccatgatgatgtcgccttcgttctcgcggtcttcgtcatccatcaggatgaccatcttgccttggcggatgtcttcaaccagttcttcgatgctattgagcgccacgcggcacccccttggtcaggatttcaggtagccgttagcggccagaaaactttcggtgatgttactcccggctggctctgcggccttatcgcccaacaacaggcgctccaggtaacgggcaagcaagtccacttccaggttcacccggcgaccaggctggtaagacgccatgatggtttcgctgagggtgtggggaatgatggtcagttcaaattcggcgccgttcacagcgttcacggtgaggctggtgccatcgacggtgatcgagcctttatgggcaatgtacttggccagctctttgggtgcgcggatgcggaactccacagcacgcgcgttttcgctgcgcgataccacttcgccaacgccgtcgacgtggccgctgaccaggtgaccgccgagacgggtggtcggggtcagggctttttccaggttcaccgggctgccggccttgaggtcgttcatcgcggtgcagtccagggtttcccgactgacatcggcagcaaagccgttgcccggcagttcgatgacggtgaggcacacgccgctgacggcgatactgtcgcccagcttgacgtcgcccaggtccaacttgccggtttcaaccagcaggcgcacgtcgccgcccttgggggtcatggcgcggatgctgccgatggattcgataatgccggtgaacatggccttctcctggaaaacgggacgggcacttgagcgcccggtcagaattatacgctcgcgggtggaagcgggatggcagtgactcgccagtcgtcgcctacagcgcgcatttcagtgatcttgagttggggagcgtcggccagtctctcaagcggccagtccagcaaaggccgggcggcggagccgaggaatttgccggcgatgaatatcacgtactcatccactaggtcttgctgggcaaatgcccccgccaggcttgggcctgcttctaccaacacttcgttgacgccacgggcggccaaggcgaccagcgccgagcgtagatcgacctggccatcgacgcccggcaccaccaggcattcgggaccacgagggaactggttctccgccgtcacgcaagtgatgaccaacgccggcccggccttgaagaacggcgcattgagcggcacgcgcaggcggccgtcgatcagcacacgcaacggcgggcgcgacatggccagcgccgtggtcgcttcgtccaggccgagttcggcggcgcgcacggtcaggcgggcgccatcggcgagcaccgtgtcggcgccggtcagcaccacgctggcctcggcacgcaggcgctgcacggcggcgcgggcggcggggccggtgatccattggctttcgccgctggccatggcggtgcgaccgtccaggctcatcgccagcttgacccgcacgaagggcaggccgtgttccatgcgcttgagaaaccccggattcaacgcgcgggcctgggcttccagcacgccactgaggacctcgatcccggcctgcgccaaacgctgcatgccgcgcccggccacttcggggttcgggtcctgcataccggccaccacacgtgcgacaccggccgttaccaacgcgtccgcgcacggcggcgtgcgcccatggtggctgcagggttcgagggtcacgtacaccgtggcgccacgggccttctcaccggcagcacgcagggcgttgggctcggcatggggttcgccggtgcgctcatgccagccttcgccgacaatctgcccatcgcgcacaatcacgcagcccacacgcggattgggatgggtggtgtacaaacccttgcgcgcgagttccagggcgcgggccatgtaatgggcgtcgagcaccgcttgttcggcagacggtgggttcattctttggcaggctcccgggccaggcggtcgatctcttcgcggaactcattgaggtcctggaagcgtcgatacactgaggcgaaacggatgtaggcgacttcgtcgagcttttgcagctcacccatcaccaactctcccaccaccaggctcttgacctcgcgttcgccggtggcacgcagcttgtgcttgatatgcaccagcgccgcctccagccgctcgacactcaccgggcgtttttccagggcgcgctgcataccggcacgcagtttttcttcgtcgaagggttggcggctgccgtcggatttgatcaggcgcggcaataccagttcggcggtttcgaaggtggtgaaacgttcaccgcaggccaggcattcgcgccggcgacggacttgatcgccctcggcgaccagacgcgagtcaatgaccttggtgtcgttggcaccgcagaagggacagtgcatggtgggcaggccacaaataatgggagggccatggtagcgcatccccgtggcaagacaagccatagcctttacggtatataggctgactattatgtttcatatttttttaagccacggattttgtcctttctggagccgtacatgcagttacgaccacttgttttgctcaccctgttcagtttcctggtcgcctgcagcagcgaagcccccaaaccgaccacgcctcaaccgacgcccgcacaagagaaaaaagtccccggtattgaagacctcggccccctgcccgcctatcaacgtgaaatcagcggcagcctgaccaacattccggccggtgccgaagtggagatggcgctgctggtgatcgacgaccgttcgcgcccgcaacaattgctggccagcagcgtgctgaccggtaacggcaagcccctggccttccgcctgcgcttcaatcctgaagcgttcccagcgggtgcccgggttgaattgcgtggtcgcgccagccagtccggccagttgatcctgcacctgccggccgtgcgcatcacccaggcgatcacccagaccaccggccccctgcaactcgtcaaggccccatgacgccaccgctgggcctgcaagttgccctgagcgaactgatcggcgacgcgcaattggtgccctgcccactgccgggcactgagttgtcgttgtggttgctggatgcggacaacatggaccgcgccttcagccccgaagaaacccggcgcatcctgcatgaaccgccctactggagtttttgttgggccagtggcttggcgctggcacggtacctggcggcgaaccctgagtgggtcgccggcaaacgcgtgctggattttggcgcgggttccggcgttgccgggattgcggcgatcaaggctggcgcgctggaagtggtggcctgcgacctcgacccgctggcgctggcggcctgccgggcgaatgccgaactcaacggtgtggaactgggttactccgcagacttttttgccgaagccgatcgcttcgacctgatcctggtcgccgacgtactctacgaccgcgcgaacctgccgctgctggaccagttcctgacccgaggccgcgaagcgctggtcgccgattcgcgcgtgcgcgacttccagcaccccgcttatcaaaggctggagatccttgatgcgctgacactgcctgacctggcggagccttgggagtttcgcaaggtgagcctgtaccattcgcggcgccagcccttatagttgccccattcccgctttattcgagacgccccatgagtgagcccacgccgtacatcttcgacgtcactaccgccaattttgaccaggcagtgatccagaactccttcgaaaaacccgtgctggtggacttctgggccgagtggtgtgcgccgtgcaaggcattgatgccgctgctggcgcagattgccgagagttatcagggtgagttgctgctggccaaggtcgactgcgatgccgagcaggatatcgttgcgcgttttggtattcgcagcctgccgacggtggtgctgttcaaggatggccagccggtggacgggtttgccggggcgcagccggagtcggcggtgcgggcgatgctggagccgcatgtgcagatgccaccgccggctgcggcagatcctctggaacaggcccaggcgctgtttgccgaaggtcgtatcagcgatgccgaagcggtgctggtcgcgctgttgggcgaagacaacaccaacgccgccgcgttgatcctgtacgcacgttgcctggccgagcgcggtgaattgggcgaggcccagaccgtgctggacgcggtgaaaagcgacgaccacaaggccgccctcgccggggccaaggcgcagatcactttcctgcgccaagcggccgacctgccggacgccgccgacctgaaaagccgcctggcgcaaaacccgcaggacgatgaagcggcctaccagttgacgatccagcaattggcgcgccagcagtacgacgcagcactggaaggcttgctcaagctgttcatccgcaaccgcagctacagcgaaggcctgccgcacaagaccttgctgcaggtgttcgaattgctgggcaacgatcacccgctggcgagcgtgtaccgccgcaagttatttgccgcgttgtattaatcgccgacccaactgtacagcggcgtatccccgccgctgctgacttttacctgggcactatggcgcaggcgcaccaacaggcgcttgcccaccgaggtatcgccggccaagccttccagttgatcaagcagttccagaccgctgagctggccggccttgcgcaacaggtcctgggcgccttgccacaggtcatcattgtgtttgaccggagccgccggtgcggtggtcgcgctggcagcgggcgccgcctgcaactgcgcacccagccgtgcccaatcgccgtcgtccagctccagagtcaaatccaccggcaagtcgccgaccgttccacgaattcgcaacatcgtcctcactcctgcacttttctgacgagcatgctcccatgcggcttgcgcaacgccaagcgggcggtcaaactctggcgccattgttataagatcacataacaaaactttcatgttctggagtcctctcatgcgccgtctgttgcttgctttaccgtttgccctgctgccattggcggttgcccacgctcatgatgatcacgaccatgaacacggtagccttggcgcccacgagcatggcgtaggccgcctcaacgcggtactcgacggccaggccctggagcttgaactggacagcccggcgatgaacctggtgggttttgaacacctggccaccaccccggcggacaaagccaaggtcgccgctgcacgcaaacagctggaaaaccccgtagcgctgttcaacctgcccaaagccgccggttgcgtggtcagcagccaggaactcaacagcccgctgttcggcgacaagcccgaagccgaccatgacgacgatgatgatgacgccaaagacggcgcccacgagcatcatcacgaccacagcgaaatccacgcccactaccagttcacctgcgccacgccgactgcgctgagcaacctggacctgacccaggtgttcaagaccttccccgccacccagaaaattcaggtacaactgatcggcccgagcggccagcaaggtgttgaagcaacggccactgcagccaccctgaaattctgagttcacatgacccacgcattgatcgaactgtccggcctgagcttcaactggcccggtcacccgcagttgctggacatccccgcgttccgcctggaagcgggggaaaccctgtttctcaagggccccagcggcagtggcaaaaccaccctgctcggcttgctcggcggcgtgcagaaacccagccagggcagcatccgcctgctcggccaggagctgaccgcactctcggccggtgcgcgcgaccgttttcgcgtcgaccacaccggctatatcttccagcagttcaacctgctgccgttcctgtcggtgcgcgagaacgtcgagttgccttgccacttttccaaactgcgtgcacaacgcgccaagcagcgccacggcagcgttgatcaggccgcagcagccctgctcgcgcacctgggtttgaaagacaaaaccctgctggaacgccgcgccgactcgctgtccatcggccagcaacaacgcgtcgccgccgcccgtgcgctgatcggtcagccggaactggtgatcgccgacgaacccacttcggccctggactacgacgcccgcgaagctttcctgcaactgctgttcgccgaatgccgcgaagccggcgccagcctgttgtttgtcagccacgaccagagcctggcctcgctgttcgaccgcaacctgtcgctggccgaactcaatcgcgccgccacgcccgcagaggtttgagatgtatctgttccgtctagcgatggccagcctggctaaccgccgctttaccgcgattctcaccgcgttcgccatcgcgctttcagtctgcttgttgctcgcggtggaacgcgtgcgcgttgaagcgcgcaacagttttgccagcaccatcagcggtaccgacctgatcgtcggcgcccgttccggttcggtgaacctgctgctgtactcggtgttccgcatcggcaacgccaccaataacatccgctgggacagcttcgaacacttcgccgccagcccccaggttaaatgggcgatcccgatttccctcggcgattcgcaccgcggctaccgcgtgatgggcaccaacgaatcctacttcgagcactaccaatacgggcgcaagcagaaccttgaactggccagcggccgagctttcgccaccgatcccttcgaagtggtactcggcgccgaagtcgccgatgcgctgcattacaaactcggcgacaaactggtgctggcccatggcgtcgcggtggtcagcctggtcaagcacgatgacaaaccgttcaccgtggtcggcattctcaagcgcaccggcaccccggtggaccgcaccttgcacatcagcctcggcggcatggaagcgatccacatcgactggcacaacggcgtgccggcccagggcaaaggccgcatcagcgccgaccaggcccgtaacatggacctcacgccgcaggccatcaccgcgttcatgctcggcctgaacaacaagatctccacctttgccctgcaacgggagatcaacgaattccgtggtgagccgatgctggcgatcctgcccggcgtggcgctgcaagagctgtggagcatgatgggcaccgccgaaaaagcgctgtttgtgatctcgctgttcgtggtgctcaccggcctgatcggcatgctcacggcgatccttaccagcctcaacgaacgccgccgcgaaatggcgatcttgcgttcggtgggtgcacggccctggcatatcgcgacgctgctgatcttcgaagccttcgccctggcgttatccggtgtgatcgccggcgtggggttgctgtatgtgtgcatcgccgcgtcacgcgggtatctgcaggccaactacggcctggacctgccgatgtcgtggccgagcgaatatgaatggacgctgctcgccggtatcctgggcgccgcgctgttgatgggcagcgtgcccgcgtggcgcgcctatcggcaatccctggccgacggcctgtccatacgtttatgaggaaggccttgatgcgtcgcgtcctgtttgcactgttgctgctgcttgccctgcccgcctgggcagccgagcctaaagaactgacctggtcggagctgataccgccggatgccccgccggaagtgccgaacatgcaacccctgcacaatctctccagcatggcgaatgccctggaatcggcccctgcagccaagcaggacctgcccaacgcgccggtggtgccagcgctcgatggccagcacattcgcttgcccggctacatcgtgccactggaagtcagtgaaaacggccgcaccaccgagtttttgctggtgccgtatttcggcgcgtgcatccatgtgccgccgccgccgtcgaaccagatcgtgcatgtcaaaagcgaaatcggcgtgaagctcgatgagttgtatcagccgtactggatcgagggtgcaatgcaggtcaaaccgtccaccagcgagctcgccgacgccggttaccagatggatgccgagaagatttacatgtacgaattgcctgaatagcgcttatcgccctttcattgagctgagtcaaaagaccgaacggaacgatctttaccattggacctacaacttttaaacgtcctttggagctcccatgaacaagtctctgctcggcgcgtccctcttcgcgctcgccctcgttgcccctgttgcgcacgctcacgaagcgggcgacattctggttcgtgccggtgcaatcaccgtgaacccgaaggccgacagcggccacgtcaaggttgaccaaggcccattggccggcgccaacctcggcggcaaggcgaccatgagcagcgacactcagttgggcctgaacttcgcctacatgctgaccaaccacgtgggtatcgaactgctggccgccacgccgttcgagcatgacgtgaagatcaagggcaccgccctcggcgccgccaacggcaagctcggcaccctgaaacacctgccgccgaccctgagcgtcgtgtactacccgctggataacaagtcggccttccagccgtacgtgggcgccggtatcaactacacctggatctacgacgagcacgtcggcagccgtgcccaaggcgcaggcttcagcaacttcaaggctgagaactcctggggctgggccgcgcagatcggcgccgactacatgatcaatgacaagtggatgatcaacgcccaggcgcgctacatcgacatcagcaccaaggccaccgtggacaacaacgccctgggccaaggcacacgtgccaaggtgaacgtggacgtggacccgatggtttacatggtgggtatcggctacaagttctgatgccgacctgaccagcaacacaaactcatgtgggagggggctcgcccccgatagcagtgtgtcagccaacacctagttgactgagccaccgctatcgggggcaagccccctcccacatttggagctcagtttcttcagctgtggcggtagaaccggtccagcaatgccggcaaccccgcccgccacgcccgtggcttgatgccgaacgtgtggaggatcttcttgcaagcgagcaccgcgtgttggggttcttcactcgcatccggccgggccgcatgggcctgggcggtgggggattcgatcgccaacgggtggtagttgcgcgcttcggtgaggatcgcctggcccagcgccaacggcgtggtcgcctcatggccggcatagtggtacgtgccccacagcggcgcagcgcaatcgagttgcttgagcaccgaaatgatcacccgtgccgcgtcatccaccggtgtcgggttgccgcgtcggtcgtccgccatcagcaactcatccggcttctcggcccgggccaggaagcgcccgagggtgccgtcgacgctgtcatccagcagccagccgaaccgcagcagcacatgttgcgggcaggtggcgcgcacgctctgttcgatacgccacaacgcctggccgcgcaggcccaggggcaccggctcgtctttttcgctgtaggcggtggcacgggagccatcgaacacgcgatagctggacggctgcaacaaggtgatgttgtggtgttggcacagctcggccaggcgctcgatggcgaactcctgggcagccaggcgggtttcgctgaccgcttcggcctggaaccagtcgaagtagtaggcgaggttgatcaacgcatcgggacgggtgtcgtcgagcaattgggtgaggctcgcggcatcccagccgtcttggggcggtttgggtgcgaggaaaccgatgtcttcctctgcaccgaggcgaatcagcgcctgcccgagggcattcccgccgcccagtaacataaggcgcattcgcatagattgagcaggcccggtctgtttggaacgaaggttttctggtattggccagaatcgttgcattttgcgggtttgtagcgcaaccgtcacggattaactatcttcgcatccacctccccgggctcatgctcaagggccgtgcgcgctggcaccatgacctgctgtggataagtctgcgcgaagtgcacctcggcgcagttatccacaagctttttcaggcgctggttgaacgcacggctcaccgcatactgcccgcccgacaccgtgcggaactgcgccgtcagcaccacgccgttgaggtccatcttgtccacgccaaacacctccagcggcccttgcaggttgtacttgaggaatacgtcgtcacggatcgactgccccgcttcacggatcagctccactgccttgtccacgtccgtgtcgtaggtgaactgtaccgagaagaacgcataggcaaattgccgcgactggttggtgaccgccttgatctggccgaacggcaccgagtgcacaaagcccttgccgtcgcgcaggcgcagggtgcggatggtcaggccttcgacggtgccggcatggccggagtcgagcaccacccaatcgccaatggacagggtgtcttcgatgatgatgaacaggccggtgatcacgtcctgcaccagttgctgggagccgaaaccgatcgccaggccgactactccggcacccgccagcaacggggcgacgttgatgccgaggttggccatggtggtgatcgcgcagatcaccaccaaaatgattttcaccgcattgcgcagcagcggcaggatggttttcacccgcgtgctgggctgacggctggagcgtttgttgaccggcggcttcagcgcttcctggatcgccgtgtcgagcaccacccagaacagccatgtcatcaacaggatcaggccgatgctgctgagcgagtcgctgatcgcgcgaccaatcgagttgcgctcggcgaattcaaacaacgacacgccccagatacgcccgagcacttcgataaacgccaccgccatgacgatgcgcaacagcgcatgcagcagactgaggaagcgctctttgtaggcgctgctgcgctggattgccacctggctgcgggatttgaacaggtgttgcagcaccgtactgaggaataccgtgccgatcagcaggatcgtggtgaacaacgcacagcgcagcaccttctggttgtcgtcgccggcgccgatcaggttgatcgccgagaccagcaccatcagcaggatcggccagtaccagagccccgagaagatccgcagtgattgctgcagcgccgggtgcttgaggcgctgggccaatggccgattgcggatcaggtgggcgaccgggcggcgcaggcgaaccaccagcacgccgaagatcaccgtcgcaaacaggccggtgaagaccgcgatgctgctggtgatattaccgcccaattggcgtgcgatctgcgggctggtgagcgcgtcgctgagggcggcgaggaagccgatcaggaacagcggcttggggcagtagtcgcgaataatctgcaccgccgggcgtttgtggccgacgttgaacatgacgatcacgcacaacagcattgaggtggaaaagataccgctgctggtggcgtaggcaaaacacagcgccagcgcgcggcccacggaggtcggtagaaaatggctgacatacaacgtaaggggcaggcaaaccaaagccgggagtgtgtacggcacgacatagcccagtacggcctgaaagcgtttgcgccgttcgaaaaacttacgttgccccaggcgtcgcaccatcacacgccccagtaacgtcagcagcgtaaaggcgccgacccacaccccggacagcaacagaaagtccccggcgacgctccacggcgagcgctcagcggtctggttgaccaggcggccgacttcgttcgcggcccggtcggcgcgcaggcgccattcgtcaatgaagttctggttgaggtccagcttctgctgcacatcatcaatgctggagctgatcgccccgagaaggccaccttccaccagcaactccggcttggccggcgcctcgggttccggcgcagtggccgcagcgtgtagcgcgccactgccgcaaaacagcagcacgccgagcagtaatgcaatcttgggattcagcaaaacaccgggctccttcaaaagggtctgtaaggaactgacgggtttgcgtcttgaacgttcccctctgccgtctgtaggaagccggaaactttcagccaaaaatcgcagtcagccatacacgggggccaggcccccacttttttcacaggagcaatcatggctgcgatccccgactgggtgcccatcacccccagcgtcgccatcactcgcttcacggtgttgacggtcaatatccacaagggcttcaccgccttgaatcgacgcttcatcctgcccgagctgcgtgaagcggtgcgcagtgtgggtgccgacatggtgttcctgcaggaaatccacggcacccacgagcgtcatccgcagcgcttcagcgactggccgaacatgccgcagtacgagttcctggccgacagcatctggccgcaatacgcctacggccgcaatgcggtctacccccacggcgaccatggcaacgcgttgctgtcgaaattccagatcgtgcgctacgacaacctcgacatctcccagagcggccatgaaaaccgtggcctgctgcattgcgtactgcgcctgccgggcaccggccaggaggtgcatgccgtctgtattcacctgggcttgcgcgaggtgcatcgccaacagcaattgcgcttgatcgagcagcgcatcagcgagatcccggccgatgcgccgttgattgttgccggtgatttcaacgactggcgacaaaaggccgacctgagccgcagcggcctcagagaggtcttcgtcgaaacccacggcaaacccgcacgaactttcccggcacgcctgccgttgctgccgctggaccggatctacgtgcgcaatttgaaggtgcataacgcccgggtactgaccacacggccctggtctcatctgtccgaccatgtgccgctgtcagtggagatcgagctatgaacgtcgccgtggaacacatcgccaccgaccaaccgcccgacgacgccaaggcccgcgaccgggattacggctggcagagcggcaaccaggtcgaactgctggagaatggcgaggcgtactttcccaaggtgttcgaggccatgcgcgcggcgcggcgggagatcctgctggagaccttcattctgttcgaagacaaggtgggccacgagctgcaaggcattctgatcgaggccgcgcggcgcggcgtgaaggtggtggcgagcctggacggattcggctgtggcgaattgagccagccctttcttggcgagctggccgaggctggcgtcatcgtgcagatgtttgaccccgcatccaagaccctgggcatccgtaccaattggtttcgccgcttgcaccgcaagattgtggtggtagatgccgaagtcgcgtttatcggcgggatcaacttttccgccgatcacctgggcgatttcggcccagaagccaagcaggattatgcggtgcgggtgacaggcccggcggtggccgacctgcatcatttcgccctggctcaaagtggccgccaggtgcgcacgcgacgcggttggcggcggcgccagcagcggcctgcgttgtggtccagcgacaacggtgaaggcctggtgcgcttgatctaccgcgacaacgtgcagcatcgcgatgacatcgaagaggcgtacatccatgcactgagcaaggcgcaacagcgcgtggtgatcgccaacgcctacttcttccccggctaccgcctgctacgcgagattcgcaacgccgcgcgccgtggcgtgcaggtgcaactgatcatgcagggccagcccgatgtgctgctggccaagctggcggcgcgcatgctctacgactatctgctcaaggatggcgtggtgattcatgagtactgccagcggccactgcacggcaaggtggcgctggtggatgacgaatggagcaccgtgggttcaagtaacctggacccgttgagcctgtcgctgaacctggaagccaacgtgttgattcgcgaccgagggttcaatcaacagctgtacgagcgcctggaaacactcgccaaaaaccattgccagaccatgccggaaaaccgcaagccacgcctgtggctctggcgattgaccgtgggcttcctggtgtttcatgtgatgcgtcacttccccgccttgaccggctggctgcctgcccacaagccacgcttgaaacccatcgggagccaggccaatgagcactgaatccaggtttgcacggtggaaaaaaccgctgacgattgccttcttcctactgctgatcgtgctgttcaccctgctcgctcgccgcattgattggagcgaggtggtgcagaccctgggcgacttcaaggtacgcacgctgctgatcgcaagcgcactgacgctgtgcagtttcctggtgtacgccagcttcgacttgattggccgcacctacatccgccagaacctggtgtggaagcagatcttgccggtaggcatcatcagctatgcgttcaacctcaacctgagcgcgtgggtcggcggcatcgccatgcgttatcggctgtattcgcgattgggcgtgagcaccagcaatatcgccaagattcttggcctgagcctggccaccaattggtttggctatatggcgatcgccggggtcgtgttcagcagcggcctggtcacgatgccaccggggtggaaagtcagcaccacggcattacaaggcatcggcgcgttgttggtgctggccagcctgggttacctggtggcctgtcagttttcgaaaaagcgggcgtggaccattcgcggcatggaaatcaacctgccgtcggtgcgcatggcgtgtctgcagttgctgctgggcgccttgaactggtcactgatggcggcggtgatcttcaccctgctgccggccaagctcgactatccactggtattgggggtgttgctgatcagtgcgattgccggagtgctcacccatattccagccgggctgggcgtactggaggcggtgtttattgcgctgttgcagcatgaggcctcgcggggcagtttgctcgccgggttgattgcgtaccgcgccatttatttcattgtgcctctgctgattgcgctggtgatgtacctcggtgtggaggcgaaggccaaggcgttgcgggtgaagaacacgcccgcctgattcaccgtggacgatgactcaaaccccaaagcggctgcggtaatcgctgggcgcgaggccggtgatttttttgaacgtggcgcgaaaggcaccggggtcctgatagcccaccgtccaggcgatatggtcgatagtgccgttggtgaactccagcatctgtcgcgccttgcccacgcgcaggtgctggcagtattcggtgggtttcaagcccgtggcgttgcgaaagcgccgtaggaaagtgcgctcttccaacccggcttcctgagccatcgccgcaagacagacatccaccgccccgctggcctgcaaccagtgctgaaccttgagaatggccgcatcaccgtggccaagaatcggcgcgaagttactgccacattggctggcactgtcactgtgttcgatcaccaggaaccgcgccgtgtccgccgcgatgctcgggcccataaggcggtcgaccaggcgcaggccaagttcggaccaggccatcaagccggcggtggtgatcaggtcgccgtcatcgacgataggcttgtcggcctccaggcgcaccgccgggtagcgggtggcgaaagacttggcggaagaccaatgggtggtagcgctgcgcccatcgagcagtccactgcgcgccagcatgatcgagccaatgcacacaccgcccagcaccgtgcctgccgcatgttgttggcgaatccactccagcagcgcagggggtgcctgctcttctgtaaactcgccgatcgacggcggcaccagcaccgccatcatcggttgctcgggaccgggatgactgctgaagacgcgcaccggtgtaccggcgctatccacctgccaatggctgacccgtagcaatggcaactgcgcggattgatgctcggcggcgatgcgattggccacgccgaacaggtcagtcaagccgtgcacggcggccagttgcgccccctggtagatcaacacacccagctcaaccacgaccattgtcagttttccccctgttattgtcggtgcagccaatcctaagtgcggacgccagctaagatactgggccccatcaacccatcacgaggcaacacacatggccaagcaagcgctcatcctaatcgatatccagaacgactacttcccccagggcaagtggccacttgacggcgtggacgccgcggcggacaaggctgcacaggtgctgcaggcgtttcgcaagacgggtgatgcggtgattcatgtacgtcatgagttcacctccgatgacgcgccgttcttcacgccgggctccgagggcgcgcacctgcatggcaaagtgctgaaccagggcaatgagccggtggtgctcaagcatttcgtgaatgcgtttcgcgaaaccaacctgcgtgccctgctggaacagcgcagcatcacggacctggtggtggtcggcagcatgagccatatgtgcatcgacgcggtggtgcgggcggcggcggacctgggctacacggttacggtgattcatgacgcctgtgcgacgcgggacctggagttcaatgggcaggtgattccggcggcgcaggtgcatggggcttatatggcgtcgctggcgtttgggtatgcgggcgtggtatcggcggatgaatacttgaaggcgcaagcggcggcggcatgaccgccacttgtcgctgcggcgtcagcgggtcgcgatgatgaacaggcgcggaaacggcagcagcacggtgccatcggccagggctggataagcctgggtgatccgcgcctggtattcctgtaggaacgcggctttttcatcgccagtcaacagtgcgagaaagggtcgcagcgccgaggctttgaaccactccaccactgccgcgtgatccgccagcgggtgcagataggtggtgcgccacacatcgacggtactgcagtgctgactcagcagctcgtagtagtaactcgcggcgtggcgctcattgtgtttgaccgcgccgatttttgcagaccaggggccatcggcggcgacttcgcgggccagccggtgggcgggctcatccagattgtccggggtttgtaccgccagcgtaccgccaggggtcagttggcggaccaggtgcgggtacagcgcggcgtggtccggcaaccattgcagggacgcgttggccaggatcacatcgaaggcttgcgcaggcttccaggcaccgatatccgccagttcgaagttaagcgccggtagccgcttgcgggcgtcggccagcatgtcatcggagctgtccatgccggtgacatgggcttgaggaaagcgctcggccagcacttcagtggagttgccgggtccacatccaaggtcaacggcattgcgtacctcggtattcgcaatggccgcgaccagatcacggacaggacgggtgcgctgctgttcgaacatcgtgtactgcttggctgaccaggtcatcacggctttccttctttttgagggtggctgcaagcctaaatcttgtgagcaatgagaacaaatgccaggattgacgcactcccatacctgaaaagtatcccgatgctggaacttcgccaactcaaggccttcgttgccatcgccgaagaaggctacatcacccgtgccgccgaacgcctgggcatgcagcaaccaccgttgacgcggatgctgcaaagccttgaagccgagttaggcgtggtcttgatggagcgcttgccccgtggcgtacgccccactacggccgggctcgcgttactggacgaagcgcggcagattctcgcccaggcagatagggttgcagaggtggtgcgccgtgccgcacgcggtgaacgggggcgcctggcaatcggcttcaccagctcggcggcgctgcatccctttgtgccgagcgttttacggcggtttcgcgaaacctttgtcggcgtgacagtggtgctggaggaagccgggaccggcgaactgctggacgcgttaatacacgagaagctcgacgccgcgtttatccgctcgcccctcagcgggacgcaatcgttgcaggacgaaccgatcctggtagaacccatgttgctggcgctaccgacggagcatcccttggcaatcgattcaggatcgcccctgcccttggcggcattggcgacggagtctttcgtgctgtatcgccggcgcgtggggttgggcttgtatgacgcgattctggtggcatgccgagaagctgggttcagcccgcaggtggtccaggaagccccgcgcatgaccgcgaccctgagcctggtggcggcggggcttggggtgtccattgtcccggcgtcgatgcagcgcttgcgcggggatggcatcgtttatcgggcgttgacggagtgccgcagcctggtggcgccgttgcatctggcgacgcggatcgatgacagttcggcggtgttgcagcggttcaaggagatggttgtcaccgccgcgtcgactgaagctgaccacgggtaataaaaaacccccgaggcctgagccagcgggggttctgtgtgttccgggttttaaacctcagaacgggatatcgtcatcaaagctgtcaaaatccggagccggctgcggagcggcctgctgtggcgctggacgcgactcacgctgcggctgctggcttggctgcggacgcgactgctgtggacgcggtgccgagttggacatgccgccctggccctgttggtcgccctgaggacggccgcccagcagttgcatggtgccttgcatgtcgaccacgatttcagtggtgtaacgcttgatgccgtctttttcccactcgcgggtctgcagcttgccttcgatgtagacctgcgaacctttgcgcaggtactcgccggcgatctctgcgaccttgccgaacatcgacacacggtgccattcggttttctcgaccttctggccggtctgcttgtcggtccactgttcgctggtcgccagactcaggttggtcacggcgttaccgttaggcaagtagcgaacttcgggatcctggccgcacgtaccgaccaatatgactttgttaaccccacgggccataacgttctcctaggctgggcgcgctgtcggcactgggttgaccagctgctcgagcgtcgcgcgatccaataattcggtgtccaatttgatgtagatggcggcttcttcagcaacaaccacggcatcggtaaccccagtaacggccttaaggcgctcgaccagaccggcttcgcggatcgcttcgggcgataacggcaaacgcagactcgtcacatagggaggttcgcgcatggtaacagcaaaggctagccagagggcagccagacctgcgcatccaaggaacacaaccgacaaaccgccatgctggaacatccagccacccatgatgccgcccagtgcggaacccaggaactgactggtggaatacacccccatcgccgtccctttgccgccggccggtgaaactttactgatcagcgaaggcagcgatgcctccagcaggttgaacgcggtgaagaacaccaccgtgccgattaccagcgctcgcaggctgtcgccgaactgccagaagaatagctcagtgagcatcagcgtcgcgacggcgccgagcaaaactcgtttcattttgcgtttcttctcgccatagatgatgaacgggatcatggcgaagaacgaaatcagcaacgctgtgaggtagacccaccagtgctgctccttgggcaggccggcttttgacaccagcgccaggggcaaggcgacaaagctgcacatcagcatggcgtgcaacacaaagatacctaaatccaggcggagcaggtccgggtgcttgagcgtcggcaacagggctttgcgcgcaacgccggactcacggtgctgcaacgtgccggtggagcgcggcaccataaaggccacgatcacgatgccgaacagtgccatgccgccggtggcgagaaacagcccgtgcagcccgaacgcgcgggtcagcaaggggccgaccaccatggccacggcaaacgacaggccgatggtcatgccgatcatggccatggccttggtgcggtgttgttcgcgggtcaggtccgacagcaacgccatgaccgcagcggaaatcgcgccggcgccttggaggatacgcccggcgatcacgccccagatggaatcggcttgagccgcgagcacgctgccgagggcaaacacgatcagccccaggtagatcaccgggcggcgaccaatgcggtcggaaatgatcccgaacggtatctgaaaaatcgcctgggtcaggccgtaggcaccaatggccaggccgatcaatgcgggggtcgcgccagcgagatccatgccataggtcgccagtaccggcaacaccataaacatgcccagcatacggaaggcgaacaccagggccagaccgcttgccgctcgggtctcgccgctactcatgcgttcgctgtggggatcgtgcatggaaaaacctcgtgtgaaccggcggcgattctaccagtcccatcgattgagagggtatatgcggcgctttgccgcgcagctttcatctaaggctgcacacggccttttgacagtgtatattcatccagtctttagccgtatactccggcattatttatgcccgccgtgcgaggccatcttggacaagatcctgattcgtggggctagaacccacaacctgaagaacatcgacctgaccctgccccgggacaaactgatcgtcatcaccggcttgtccgggtccggcaaatcgtcgctggcgttcgacacgctgtatgccgaaggccagcgccgctatgtggaatcgctgtcggcctacgcccggcagttcctgtcgatgatggaaaagcccgatgtcgacaccattgaaggcttgtcgccggcgatctccatcgagcagaagtcgacctcccataacccgcgttccaccgtgggcaccatcaccgaaatctacgactacctgcgcctgctgtatgcacgcgtgggtattccgcgttgccctgaccacgacatacccctggaagcccagaccgtcagccagatggtcgacctggtgctggcccagccggaaggcgccaagctgatgctgctggcaccggtgattcgtgagcgcaagggcgaacacctttccgtcttcgaagagctgcgggcgcaaggttttgtgcgggcacggatcaacggcaagctgtatgagctggacgaagcgccgaagctcgacaagcagaagaagcactcgatcgatgtcgtggtcgaccgcttcaaggtgcgcgccgacctgcagcagcgcctggcggaatccttcgaaaccgcattgaaactggccgacggtattgcgctggtagcaccgatggacgacgaaccgggcgaagagatcatcttctccgcccgctttgcctgcccgatctgcggccatgccatcagcgagttggaacccaagctgttttccttcaacaacccggccggcgcctgcccgacctgcgatggcctgggcgttaagcagttcttcgatatcaagcgcctggtcaacggtgacctgacgctggcggagggcgccatacgcggctgggacaggcgcaacgtctattacttccaaatgctggggtcgctggcgtcgcactataaattcagcctcgaagtgcctttcaatcaactgccggcggaccagcagaaagtcatccttcacggcagcggttcgcagaacgtcgacttcaagtacctgaacgaccgtggcgatatcgtcaaacgctcccacccgttcgaaggcatcgtgccgaaccttgagcgtcgctaccgcgagaccgaatcggccagcgtgcgcgaagagttggcgaaattcctcagcacccagccttgcccggattgccgcggcactcgcctgcgtcgtgaggcacggcatgtgtgggtcggcgagaagacattgccagcggtgaccaacctgccgatcggtgatgcctgcgaatactttggcgtgctcaagctgaccggtcgccgtggggagatcgccgacaagatcctcaaggaaatccgcgagcggctgcagttcctggtcaacgttggcctggactacctgtcgctggatcgcagcgccgataccttgtctggcggtgaagcccaacggattcgcctggccagccagattggcgccggtctcgtgggggtgttgtacattcttgatgagccgtccattggtttgcaccagcgggacaacgatcgcctgctgggtacgttgaaacacctgcgggatatcggcaacacggtgatcgtggtcgagcacgatgaagacgcgattcgcctggcggattacgtggttgatatcggcccgggcgcgggcgtgcatggcggacatattgtcgccgagggcacgcctgcagaagtcatggcgcacccggactcgctgaccggtaagtacctgtccggccgggtgaagatcgaagtaccggcaaagcgcactccacgtaacaagaagctggcgctgcacctcaagggcgcacgcggcaacaacctgcgcaatgtagacctggaaatcccgctggggctgctgacctgcgtgaccggtgtttccggctccggcaagtcgacgctgatcaacaacacgctgttcccgttgagtgccactgccctgaatggcgcgaccaccctggaagcagcggcccatgacagcatcaagggcctggagcacctggataaggtggtcgatatcgaccaaagcccgattggccgtaccccacgctccaacccggcgacctacaccggactgttcacgccgattcgtgagctgtttgcgggcgtaccggaatcacgctcacggggctacggaccgggtcggttctcgttcaacgtcaagggcggccgctgtgaagcgtgccagggcgatggcttgatcaaggtggagatgcacttcctcccggacatctacgtgccgtgcgatgtgtgtaagagcaagcgctataaccgcgaaacgctggagatcaaatacaagggcaagagcatccacgaaaccctcgagatgaccatcgaggaagcgcgggagttcttcgacgccgttccggcactcgcgcgcaagctgcagaccctgatggatgtgggcctgtcgtatatcaagctggggcagtcggcgaccacgctgtccggtggtgaagcgcaacgggtgaaactgtcccgcgagctgtcaaagcgcgataccggcaagaccctgtatatccttgatgagccgaccaccggcctgcacttcgcggatatccagcaattgttggacgtgctgcaccgcctgcgcgaccacggcaacaccgtggtagtgatcgagcacaaccttgacgtgatcaagactgccgattggctggtagacctcgggccggaaggtggttccaagggcggtcagattatcgctgtgggcacgccggagcaggtctccgaaatgccgcagtcgcacactggttactacttgaagccgttgctggagcgcgaccgggcctgactttttcaggctcaataaaaagcccctgtcactttacggtgacaggggctttttcgtatccgggaatcagaactgcgattgcaggtaattctccaggccgatcagcttgatcaggcccagctgcttttccaaccagtaggtgtgatcttcttcggtgtcattcaactgcacgcgcaggatttcccgcgtgacaaagtcgctgtgctgctcacagagctcgatgcctttgcaaagcgcagcacggaccttgtactcgagacgcaggtcggcagcgagcatgtcagggaccgtggtgcccacatccaggtcatccggacgcatacgtggcgtgccttcgagcatgaggatacggcgcatcagtgcgtcggcgtgctgtgcctcttcttccatttcgtggttgatacgctcgtagagctcagtaaagccccagtcttcgtacatacgcgagtggatgaaatattggtcacgagccgccagttcgcccgtcagcaacgtgttgaggtaatcgattacgtcggggtgaccttgcatcgccctacatctccctgcttgaaagtctgtagtttgaaccatgatgactcgaaggtcacgggaccaacggcagaaaagtgaagattttccgagaaaagtggcggaattaacgcaaaaaccgcccaaatgagggcggttctgcttatcgtttagagtcagttaagcgatacacccagcgcctttgcgattgcttctccataagccggatcggccttgtagaaatgctgcagttggcgctgaaccacgtcagtggaaacaccccccattgcgccggcaatgttgttggtgagcaagtctttctgctcatcgctcatcaagcggaacagtgcaccggcatggctgtagtaatcggtgtcttcacggtgatcgtagcgatcagccgcaccgctcaaggccaaggcaggctcagcgtactgaggagcctgtttcggcgcatcggcgtagctgttcggctcgtagttaggtgcagcaccgccgttgctgccgaacgccatcgaaccatcacgctggtagctgttcaccgggctacgtggggcgttcaccggcaagtgctggtgattggtgccgacacggtagcggtgggcatctgcgtaggcaaagacacgaccttgcagcatgcggtctggcgacaggcctacgcctggaaccatgttgctcgggccgaatgcggcttgttccacttcagcaaagtagttctgcgggttgcggttcaactccagttcgccgacttcaatcaaagggaattccttctgcgaccaggttttggtcacatcgaaaggattctcgtaatgagcgttggcctgggcctcggtcatgatctggatgcacacgcgccatttcgggaaatcaccgcgctcgatcgcaccaaacagatcgcgctgggcatagtccggatcagtaccggccaggcgagcagcttcggcgggtgccagattcttgatgccctgtttggtcttgtagtgccacttgacccagtgacgctcgcccttggcgtttatcaggctataggtgtggctgccaaagccgtgcatgtggcggtagccatcagggatgccacggtccgagaacaggatggtgacctggtgcagcgcctctggcgagtgagaccagaagtcccacatcatttgcgcgctcttcaggttgctttgcggcagacgcttctgggtgtggatgaagtcagggaacttcaatgggtcgcgaatgaagaataccggggtgttgttgccaacgatgtcccagttgccttcttcggtatagaacttcagggcgaagccgcgtgggtcgcgctcggtatccgccgaaccgcgttcgccacccactgtggagaatcgcaagaaggtaggcgtttgcttaccgacggactcgaacagtttggcgctggtgtattgagtaatgtcttgggtaaccgtgaaggtgccgtaggcacccgagcccttggcgtgtacgcggcgctccgggatgttttcacggttgaagtgagcgagcttctcgatcaggtgaaaatcgtcgaggagcaacggaccgcgcgggccggcagaacgggaattctggttgtccgcaacgggagcgccgctggcggtagtaaggattttattctggctcatgttcaatttccctcaggtcagacttggaactgccggctaatcggcttggagggagtattgatcatcaatatgacgtctacaaattcattaaattgtaggcttcgatagaaaataactaccaaactccccgcgactcatagtgccaagcacaaccgacagaaaattgtacaaatcgcgcttttcttacgcgcacaaaaaaccgggcactaggcccggttcttcgttacagcttgtcgtcttactcggcgcttacagcttcgccagcagtagcacgatcaaccaactcgacgtacgccataggcgcgttgtcgccagcgcggaaaccgcacttgaggatgcgcaggtagccaccctcacgggtagcgtaacgcttgcccagatcgttgaagagcttaccaacgatagctttcgaacgagtacggtcgaaagccagacggcggttagccaggctatctgtcttggccaaagtaatcagcggctcagcaacgcgacgcagttctttagctttcggcagtgtagttttgatcagctcgtgctcgaacagcgacaccgccatgttttggaacatggccttgcggtgcgagctggtacggctcaggtgacgaccacttttacgatgacgcatggttcattccttaccaaactcacgttcggtgattacgacgatcaggcagtcgccttgtcgtccttcttaagacttgcaggcggccagttgtcgaggcgcatgccgagggacagaccgcgggaggccagaacgtccttgatttcagtcaaggatttcttgcccaggttcggagtcttcaacagttctacttcggtacgctgaatcaggtcgccgatgtagtaaatgttttccgccttaaggcagttagccgaacgtacagtcagttccagatcgtcaaccgggcgaagcaggatcggatcgatctcgtcttcctgctcgattaccactggttcgctgtcacctttgaggtcgacgaacgcagccaactgctgttgcaggatggttgcagcgcggcggatagcctcttcaggatccagagtaccgttggtttccagatcaataaccagcttgtccaggttagtacgctgctcgacacgggcgttttccaccacgtatgcgatgcggcgaaccgggctgaacgaagagtcaagctgcaagcgaccaatgctgcggctttcgtcttcatcgctctgacgcgagtcggccggttcataaccacgaccacgagctacggtgagcttcatgttcagggcgccgttagacgccaggttagcgattacgtgatcggggttaacgatctcgacatcatgatccagctgaatatcggcagcggtaaccacccccgaacccttcttcgacaaggtcagcgtaacttcgtcacggccgtgcagcttgatagccagacctttaaggttcaacaggatttcaattacgtcttcctgtacaccttcgatggcgctgtactcgtggagcacaccgtcaatctcggcctcgactactgcacagccgggcattgaggacaacaggatgcggcgcagcgcgttgcccagggtgtggccaaaaccacgctcgagaggctcgagagtaattttggcgcgggttggactgacaacctgcacatcaatgtggcggggtgtcaggaactcatttaccgaaatctgcatggatgcacctattttctagcccttacttggagtagagctcgacaatcaggctttcgttgatgtcggcggacagatcactgcgagcaggaacgttcttgaaaacgcccgacttcttctcagtgtctacttctacccattctacgcggccacgttgggcacacagatcgagagcttggacaatgcgaagttggttttttgctttctcgcgaactgcgaccacgtcaccagcacgaacctggtaggacggaacgtttacggtctgaccgttaacgctgatcgacttgtgcgataccagctgacgggattcggcacgagtcgaaccaaagcccatacggtatacaacgttgtccagacggcattcgagcagttgcagcaggttttcaccggttgcacctttcttgccagcagcttctttgtagtagccgctgaactgacgctcgagaacgccgtagatacgacggaccttctgcttttcacgcagttgggtgccgtaatcggactggcgaccgcggcgttggccgtggataccaggtgctgcttcaatgttgcacttcgattcgatcgcgcgcacgccgctcttcaggaagagatcggtgccttcgcgacgagcgagtttgcattttggaccaatgtaacgagccattctttacaatctcctggattacacgcggcgcttcttcggcggacggcacccgttgtgcgggattggcgtcacgtcggtgatgctggcgatcttatagccacagccgttcaaagcacggacagcagactcacgacctggacctggacctttgacgttaacgtcgaggtttttcaggccgtattccagcgcagcttgaccagcacgttcagcagctacttgagcagcaaacggggtggacttgcgggaaccgcggaaacccgaaccaccggaggtagcccaagaaagcgcgttaccttgacggtcggtgatggtcacgatggtgttgttaaaagaagcatggatgtgggcgatgccatcaaccactgtctttttaacttttttacgaggacgagcagcaggttttgccatgataattttcctgtcgattcgctggggcgattacttgcggatcggcttacgcggacctttacgggtacgcgcgttagtcttggtacgctgaccgcgcactggaagaccacgacgatgacgcagaccgcgatagcaaccgaggtccatcaaacgcttgattttcatgttgatttcgcgacgcaggtcaccttcagtggtgaacttcgccacttcgccacgcagcaattcaatctgctcgtcgctcagatccttgatcttagcggctgggtttaccccagcaactgcgcaaattttctgcgcagtagtgcgaccaacaccatagatgtaggtcagcgagataacagtgtgcttgttatctggaatgttaacgcctgcaatacgggccattcagtgggactccaattgacagctacctacgccccggaagccaagaaatagggcgcgagataatatcgctgtaataacaaataatcaacccggcagcgcactagctgccgggcttcaagcggatcacactcagccttggcgctgtttgtgacgcggttccgcgctgcaaattactcgaacaacaccttcgcggcgaataatcttgcagttacggcacagctttttcaccgatgcacgaactttcatcaccaactcctcgaaccttatggggtactcagcgcaacatgccgctgccgtagcccttcaggttggctttcttcatcagggattcgtactggtgcgaaacgaggtgcgattgtacttgggacatgaagtccatcacaaccacgaccacgatcagcaacgaggtcccgccaaggtagaacggaacgtttgctgcaaccaccaggaactggggcaacaagcacacggccgtcatatatagagcaccgaacagggtcaaacgagtcagaacgccatcaatgtagcgtgcagactgctcacctggacggatgcccggaataaaggcaccggacttcttcaggttttccgctacgtctttcggattgaacatcaacgccgtatagaagaagcagaagaaaataatccctgcactaaacagcagaatattcaacggctgaccaggagcgatcgactgagagaggtcctgcagccagcccatattttcagactgaccaaaccaggtacccaacgaagccggaaacagcaaaatgctgctcgcgaaaattgccggaataacaccggccatattcactttcagcggcaagtggctagtctgcgcagcaaaaaccttacggccctgctgacgcttggcgtagtgaacagcaatacgacgctggccacgctcaatgaacaccacaaaaccgataatcgctactgccagcaaaccgatggcaaccaaggcaaaaatgttgatatcaccctgacgtgcagactcgaaagactgcccaatcgctctcggaagaccggcgacgatacctgcgaaaatcaacatcgagataccgttgccaacaccacgctcagtaatctgctcacccagccacatcatgaacatcgcaccagccacaaaagtggataccgcgacgaaatggaagccaaagtcaccagtgaacgcaacaccctgcccggccaggccaacggacatgccgatagcttggaccaaggcgaggatgacagtgccgtagcgggtgtactggcttatcttgcgacggccagcttcaccttccttcttcaactgctccagctgcggactgacggcggtcatcagttgcatgatgatcgatgccgagatgtacggcatgatccccagtgcaaagatgctcatccgttccagcgcgccgccggaaaacatgttgaacaagctaagaatggtcccctcattctgtcgaaacaggtctgcgagtcggtccgggttgatacctggaaccgggatgtgtgcgcctattcggtagacgataatcgccaggaacagaaaacgcagacgagcccaaagttcagacataccgcctttgccgagcgctgagagagcaccttgcttagccatttattcctcgaacttgccgccagctgcttcgatagccgaacgcgcacctttggtggcgccgattcccttgccgatagtgacagcgcgagtcacttcaccggacagcatgattttcacgcgctgtacgttgacgttgatcacgttggcatctttcagggtctgcacagtaacgatgtcgccttccactttagccagctcggacagacgcacttctgcgcgatccatggctttcagagaaacgaaaccgaacttaggcaggcgacgatgcagcggctgttgaccgccttcaaagcctggagcgatggtgccaccggagcgggaggtttgacctttgtggccacggccaccagtcttacccaaaccgctaccgataccacggcccggacgatgcttttcgcgacgggaacccggcgctggactcagatcattgagtttcatcgattaaccctctacacgcagcatgtagtaagccttgttgatcatcccgcgattctcgggagtatcctggacttctacagtgtgaccgatgcgacgcagacccaaacctttaacgcacagtttgtggttagggatgcggccggtcatgcttttgatcagcgttactttaacggtagccatgatcagaagatctccttgacagtcaggccacgcttggcagcgatggactcaggagattgcatagctttcaaacctttgaaagtggcgtgaaccacgtttaccgggttagtcgagccgtagcacttggccagaacgttctgaacgccagcaacttcgaggacagcacgcatagcgccgccagcgatgataccggtaccttcagaagcaggctgcatgtacaccttcgaagcgccatgggcggacttcattgcgtactgcagagtggtgccgttcagatcaacttggatcatgttgcgacgagcagcttccattgccttctggatcgcagcaggcacttcacgtgacttgccacggccgaagccaacacgccctttaccatcacctaccacggtcaacgcggtgaaagtgaagatacggccgcctttaacggttttggctacgcggttaacttgaaccagcttctcaatgtagccttcgtcgcgcttttggtcgttatttgacataacttagaactccagcccagcttcacgagcagcatcagccagcgctttcacgcgaccgtggtacttgaagccagagcggtcgaaagccacttgcgagacgccagcggccttagcacgcgtagcgaccagctggccaacctttgtggccgcgtcgatgttgccggtggcaccatcacgcagttctttatccaaagtcgaggcgcttgccaggactttgttgccgtcggccgagatgacctgggcgtagatgtgctgcgacgagcggaacacgcagagacgcacgacttcgagttcgtgcattttcaggcgtgctttgcgagcgcgacgcagtcgagtaacttttttgtcggtcatttgctatgccctacttcttcttggcttctttacgacggacgacttcgtccgcgtagcgcacacctttgcctttgtacggctctggtggacggaagtcgcggatctcagcggccacttgacctaccagctgcttgtcgatgcccttgatcaggatatcggtctggctaggagtctcagcagtgatgcccgctggcagttcgtaatccacagggtgcgagaagccaagggccaggttcaaaaccgtgccttttgcttgcgctttgtaaccaacaccgaccagctggagcttacgctcgaagccttggcttacgccttggaccatgttgtttaccaacgcacgcgtggtaccggccattgcgcgagtttgttgatcgccattgcgagcagcgaaacgcagctcaccagcttcttcaacgatctcaacggacgaatggatgttcagttcaagagtacccttggcacccttcaccgaaagctgttggcctgcgaatttgacttcgacaccggctggcagcttaacggggttcttagcgacgcgagacatgcttatccccccttagaacacagtgcaaagaacttcgccgccgacaccggcagcgcgcgcagcacgatccgtcatcacacctttgttggtggagacgatagacacgcccagaccgccacgaactttcggcagatcttcagcggacttgtactgacgcaggcctggacggctaacgcgcttcacttcctcgatgaccgaacggccttcgaagtacttcagctcgatggacagcagtgcttttacatcgctgctgatctgataacccgcaatgtagccttcgtctttcaggactttggcaacagctaccttcaacttggaagatggcatgcttacgacggacttttcagccatctgggcattacggatacgagttagcatgtccgctaacgggtcctgcatactcatgggctagacgctcctaatacaaaaaaattagccttgcggctacatatgtcgccgagaatctccgggtaaaacacacgggctcaggcgagccgcgtattttagacacactccagaaatgaaacaagccccaaaaggggcttgttccagattcaaggtcaccggtggtcgttatcttgcgattcgaaccacctggacttcgaaagtacttaccagctggctttaaccagacctggtacgtcaccacgcattgccgcttcacgcagtttgttacggccgaggccgaacttgcggtaaacgccgtgtggacgaccggtcaggcggcagcggttacgcatgcgcgaggcgcttgcgtcacgtggctgcttctgcagggcaactgtcgcttcccaacgtgcttctggacttgcgttcagatcaacgatgattgctttcagtgctgcacgcttcttggcgtacttggcaaccgtgagctgacgcttcagctcgcggtttttcatgctcatcttggccatggtcctactccaatcagttgcggaacgggaatttgaaagcacgcaacagggcgcgaccttcatcatcgttcttggcagtggtggtcagggtgatgtccagaccgcggagagcatcgatcttgtcgtagtcgatctccgggaagatgatctgctctttcacgcccatgctgtaattaccacgaccatcgaaggacttggcattcaggccgcggaagtcgcgaacccgaggcagggagatcgacagcagacgatccaggaactcatacatacgctcacggcgcagggtcactttgacgccgatcggccaaccttcacggactttaaagccagcgatggatttccgagcgtaggtcacaacgactttctggccggtgatcttttccaggtcagcaacagcgtgctcgatgacttttttgtcaccgatcgcttcgcccagacccatgttcagggtgattttggtaacgcgcggaacttccatcacgttcccaagcttaagttcttccttaagcttaggggcgatttccttccggtaaatctcttgtagtcgtgccatggtctaatctacctagcagtgttcaagcatcaaccgctttttgggtcgacttgaagacacgaattttcttaccgtcttctactttgaaaccaacgcggtcagccttgttggtttcgccgttgaagatggcgacgttagaagcgtccagcggagcttctttctcgacgataccgccctgcacgcccgacatcgggttaggcttggtatgacgcttgaccaggttcagaccaccgataaccagacggttattagcgagaaccttaagcaccttaccgcgcttacctttgtctttgccggcgatcacgatgatctcgtcgtcacgacgaatcttttgcatgtcggatctccttacagcacttctggggcgagcgagacgatcttcatgaacttctcagtacgaagctcacgggtcactggcccaaagatacgggtgccgatcggctcttgcttgttgttcagaagaacagcagcgttgccatcaaagcggataatggagccatcagcacgacgtacgccgtggcgagtgcggactacaacagcagtcatcacttggccttttttcactttaccgcgaggaattgcttccttcacggtaactttgatgatgtcaccgataccagcgtaacgacgatgggagccacccagcaccttgatgcacataacacggcgagcgccgctgttatcggccacatcgagcatggattgagtctgaatcatataatttctccgacccctagtccttagacttccacagcgcgttcgagaacatcaaccagtgcccaagacttggtcttggccagcggacgagtttcacgaatagtgactttgtcgccgatgtggcactgattggtttcgtcgtgcgcgtgcagcttagtcgaacgcttaacatatttaccgtagatcgggtgcttaacgcgacgctcgatcagaacggtgatggttttgtccatcttgtcgctgacaacacggccagtcagcgtacggacagtcttttcggcttcagccatgatcacttacctgcctgctggttgagcacagtcttcacgcgagcgatgtcacgcttaacttgcgagagcagatgagactgccccaactggccagttgctttctgcatacgcagattgaactggtcgcgcagcaggccgagcagttgctcgttcagctgctgtgcggatttttcacgaagttcattcgctttcatcacatcaccgtccgtttaacaaaggaggtggcgagcggcagctttgcagcagccagggcgaaagcctcacgcgccagctcttcagaaacaccctcgatttcatacaggactttgcctggctgaatctgggctacccagtattccacgttacccttacctttacccatccgaacctcgagaggttttttggagatcggcttgtccgggaatacacggatccagatcttgccgccacgtttcacgtgacgggtcagtgcacgacgcgctgactcgatctgacgagcggtgagacgaccacgagctacagacttcagcgcgaactcgccgaagctgactttgctaccgcgctgagccagaccacggttgtggcctgtcatctgcttgcggaacttcgtacgcttaggttgcaacatttggcgtaccccttacttagcagcttttttacgaggcgctggtgcttgtggtttcagttcttcttggcgaccaccaattacttcgcctttgaagatccaaacctttacaccgatcacaccgtaagtggtgtgagcttcgtagttggcatagtcgatgtcggcacgcagggtgtgcagtggcacacgaccttcgcgataccattcagtacgtgcgatttcagcaccgccgagacgaccgctcacttggattttgatgcctttggcaccaatgcgcatggcgttctgtacagcgcgcttcatagcgcgacggaacattacgcgacgctccagctgctgagctacgctctgcgcaaccagcataccgtcgagctccggcttgcggatctcttcgatattgatgtgcacaggcacacccatttgcttggtcaggtcctgacgcagtttctcaacatcttcacctttcttcccgataacaatacctggacgagcggtgtggatggtgatacgtgcagtttgcgccggacgatggatatcgatacggcttacggacgcgctttttagtttgtcttggagatactcacgcaccttcagatcagcgaacaagtagtccgcataagtccgaccgtctgcgtaccagacggaggtgtgctccttgacgattcccaggcgaatgccaatgggatgtactttctgacccatctcttcgactccgttacttgtcagcaaccttgacagtgatatggcaagaccgcttgacgatgcgatcagcacggcctttggcacgtggcatgatgcgcttcagcgaacgcccttcgttgacgaaaacggtgctgaccttcaggtcatcaacgtctgcgccttcgttatgctcggcgttggctacggccgactccagcactttcttcatgatctcggcggctttcttactgctgaaagccaacaggttgagcgcttcgcccaccttcttcccgcggatctggtcggcgaccaagcgggctttctgggcggagattcgagcgcccgacaacttagcggctacttccatttccttaccccttaacgcttggctttcttgtctgccacgtgcccacgataagtgcgggtaccggcaaactcgcctagtttgtggccgaccatgtcttcgttcacgagaactgggacgtgcaagcgaccgttgtgtacagcgatggtcagaccgaccatttgtggcaggatcatcgaacgacgcgaccaggtcttaactggtttgcgatcgttcttttccgccgccacttcgatcttcttcagtaggtgaagatcaataaaaggaccttttttcagagaacgtggcactgtcgtatccctctatttacttgcgacgacggacgatcattttgtcggtacgcttattaccacgagtcttcgcgcccttagtcgggaagccccatggcgataccggatgacgaccaccagaggtacgaccttcaccaccaccgtgtgggtggtcaaccgggttcatggcaacaccacgaacggttgggcgaacgccacgccagcgtttggcaccagctttacccagcgaacgcaggctgtgctcggagttcgagacttcgcccagggtcgcgcggcattcagccagcactttacgcatctcaccagaacgcagacgcagggtcacgtagacaccttcacgagcgatcagctgagccgaagcaccagcggaacgagcgatttgcgcgcctttacctggcttcaattcgatgccgtgtacggtgctaccaactggaatgttgcgcagttgcagagcgttgcccggcttgatcggtgccagggcacctgcgatcagctggtcgccagcgctcacgcctttaggggcaatgatgtagcgacgctcgccatctgcgtacagcagcagagcgatgtgagcagtacggtttggatcgtattcgatacgctcgacagtggcagcgatgccatctttgtcgttgcgacggaagtcgaccagacgataatgctgcttatggccaccaccgatgtgacgagtggtaatacgaccattgttgttacgaccaccagacttcgattttttctcgagcagcggtgcgtgaggagcgcctttatgcagctcctggttgaccaccttgaccacaaaacggcggccaggggaagtcggtttgcatttaacgattgccatgatgcaccccttccttactcagcactgctgctgaaatcgagatcttggcctggctgaagggagataactgccttcttccagtcattacgcttgcccagaccgcgagcagtgcgcttgctcttacccagaacattcagggtagtaacacgctctactttcacgctgaacaggctttcgacggccttcttgatttccagcttggttgcgtcagttgcaaccttgaaaacgaactggcctttcttgtcagccagaaccgtagccttttcggaaacgtgcgggccaagcagaactttaaatacgcgttcctggttcatcccagcagctcctcgaatttcttcacggccgacacggtgatcaacaccttgtcgtatgcgatcagactaactggatcggaaccttgcacgtcacgtacatcaacgtgtggcaggttgcgagcagccaggtacaggttctgatcaacagcttccgacacgatcaaaacgtcggtcaggctcatgttgttcagtttgcccagcagatctttggttttcgggctttcaacagcgaagtcctgaaccacgaccagacggtcagtacgcacgagttcagcaaggatggagcgcagagctgcgcggtacatcttcttgttgagcttctgcgagtgatcctgcggacgagctgcgaaagtggtaccgccgccacgccagattgggctacggatagtaccggcacgagcacggccagtacctttctgacgccaagggcgcttaccgccaccacgtacgtcggaacgggtcttttgctgcttgctaccttgacggccgccggccatgtaggccacgactgcttggtgaaccagcgtctcgttgaattcgccgccaaatgtcagttcggaaacttcgatcgcttgagcgtcatttacatttaattgcatgtcagcttccccttaaccgcgagccttggccgctggacgtacaaccaggttgccgccagtagcgccaggaacagcacccttgaccaacaacagattgcgttcagcgtcgacgcgcactacttcgagggactgcacggtcacgcgctcagcgcccatatgaccggacatttttttgcccttgaatacacgaccaggagtctggcactggccaatagagcccgggacgcggtgggaaacggagttaccgtgagtgttgtcttggccacggaaattccaacgcttgatcgtaccctggaagcctttacctttggactgaccggttacatcaaccagttgaccagcagcgaagatttcagcgttgatcagatcgccagcctggtagtcaccgtcttcaagacggaactccataacagtgcgaccagctgcaacgtttgctttagcgaagtggcctgcttgagcagcagtcacacgcgaagcacgacgctcgccgacagtgacttgcactgcacgatagccatcggtttcttcagttttgaactgggtgacgcgattcggctcgatctcaatgaccgtgaccggaatggagacaccttcttcggtgaaaatacgggtcataccgcatttacgaccgactacaccaatagtcatgttgtaaacctcatgagtgtacggggctttcacccgctatggccgcccatttcagagcgttacacgactaagacccgagtcttagccgaggctgatctgtacttccacaccggccgccagatcgagcttcataagtgcatcaacggttttatccgttggctggacaatgtccagtacgcgcttatgagtacggatctcgtactggtcacgcgcgtctttgttgacgtgcggggagaccagaacggtgaaccgctctttacgggtaggcagtggaattggaccacgcacttgtgcaccagtacgtttcgcggtttccacgatttcctgggtggattggtcgatcaggcgatggtcaaaagccttcaacctgatacggatttgctgattttgcattggatttcagactccggctgctattcccagcgagcgcaatacgcccgttaaaaggaggcgcaattctatagacggccctgataggtgtcaacccaataaaaaaggcccccgctgagcgggggccttttcaaaacatcagagctatctcagaagagataattactcgatgattttagctacgacgccagcaccaacggtacggccgccttcacggattgcgaaacgcagaccgtcttccatagcgatggttttgatcagggtgacaaccattttgatgttgtcgcctggcattaccatttctacgccttccggcagttcgcagttaccagtcacgtcagtagtacggaagtagaactgtggacggtagcctttgaagaacggagtgtgacgaccgccttcttctttgctcagcacgtacacttcagcttcgaacttggtgtgcggcttaaccgaacctggcttaaccagaacctggccacgctcaacgtcgtcacgcttggtaccacgcagcagaacgccgcagttctcgccagcacgaccttcgtcgagcagcttacggaacatttcaacaccggtgcaggtggtgacggtagtgtcacgcagaccaacgatttccagtggatcttgaaccttgacgataccgcgctcgatacgaccagttacaacagtaccgcgaccggaaatcgagaatacgtcttcgattggcatcaggaacggcttgtcgataacacggactggatctgggatgtagctgtccagagtctcaaccagcttacgaacggacgtggtgcccatttcgttgtcgtctttgccttccagagccatacgagcagaaccgatgatgatcggagtgtcgtcacctgggaagtcgtaagtgctcagcagatcgcgcacttccatctcaaccagttccagcagctcagcgtcgtctaccaggtcagccttgttcaggtaaaccacgatgtacggaacgcctacctggcgggacaacaggatgtgctcacgggtttgtggcatcggaccatcagcggccgagcaaaccaggatagcgccgtccatttgagcagcaccggtgatcatgttcttcacatagtcagcgtgacctgggcagtcaacgtgagcgtagtgacggatcagcgagttgtattcaacgtgcgcggtgttgatggtgataccacgagctttttcttctggcgcgctgtcgattttatcgaaatcaacgattgcggaaccgaaaacttcggagcaaacgcgagtcagagcagcagtcagagtggttttaccgtggtcaacgtgaccgatggtgccaacgttgacgtgcggtagggaacgatcaaatttttctttagccacgacaattaactccttgcctaaaggactgaatcagccttgttttttggatacagtttcagcgatgtgcgccggagctgtgttgtattttttgaattccatagagtagcttgcgcgaccctgggacatggagcgaacgtcggtcgcataaccgaacatctcacccaacggaacctcggcgcgaatcactttgccggaaaccgtgtcttccatacccaagatcatgccgcgacgacggttaaggtcgcccatgacatcacccatatagtcttcaggtgtaacaacttctaccgccatgattggctcaagcaactcaccaccgcccttctgggccagttgcttggttgccatggaagcagccaccttaaacgccatctcgttggagtcgacgtcgtggtaagaaccgtcaaaaacggttgctttcaggccgatcagcggatagccggcaacaacaccgttcttcatctgctcttcgatacccttctggatagcagggatgtattccttaggaaccacaccacctactacttcgttcacgaattgcagaccttcctgaccttcgtcagcaggagcaaaacggatccagcagtgaccgaactgaccacgaccgccggactgacgaacgaacttgccttcgatttcacagtttttcgtgatgcgctcacgataggaaacctgaggcttaccgatgttggcttcgacgttgaactcacggcgcatccggtcaaccaggatgtccaggtgaagctcgcccatgccggagatgatcgtttgaccagtctcttcatcagttttgacgcggaaagatggatcttcctgagcaagcttgcccagagcgatacccattttttcctggtcatccttggtcttaggctctacggcaaccgaaataaccggctccgggaagtccatgcgaaccaggatgattggcttggcagcgtcgcacaaagtctcacccgtggtgacgtccttcatgccgatcagggccgcgatgtcaccagcgcgcacttccttgatctcttcacgggcgtttgcgtgcatttgcaccatacgacccacgcgctctttcttgcctttaaccgagttgatcacgccgtcgccggaggccaacacgcccgaataaacgcggacgaaggtcaaagtacccacgaatgggtcggtagcgatcttgaacgccagagccgagaacggctcgctgtcatcggcgtgacgctccatttcttcttcctcgttatcagggttggtacccttgatagcaggaatgtcggttggagccggcaggtagtcgataacggcgtcgagaaccaggggaacacccttgttcttgaaggaagaaccgcaaacagccaggacgatctcaccagcgatagtacgctgacgcagagcagccttgatttccacgttggtgagctcttcaccttcgaggtacttgttcatcagctcttcgctggcttcggccgcagcctcaaccatgttgttgcgccactcgtcagccagttcctgcaactctgcagggataggcttgcgaacaggaaccatacctttgtcggaatcattccagtaaacagcttccatgttgatcagatcaatctgaccctggaagttgtcttcggaaccgatagccaattggattggcaccggggtgtgacccagacgctgcttgatctgaccgatcacgcgcaggaaattggcaccagcacggtccatcttgtttacataaacaagacgtggaacgccgtacttgttggcttggcgccatacggtttccgactgaggctcaacacccgaagtaccgcagaacacaacgacagcgccgtcgagtacgcgcagggaacgctcaacttcaatggtgaagtctacgtgacccggggtatcgattacgttgaagcgatgctcgtctttgtactgcttctcggaacctttccagaaggcggtaatagcagcagaagtaatggtaataccacgctcctgctcctgaaccatccagtctgtggtcgcggcgccatcatgcacctcgcccattttgtgacttttgccggtgtaaaacagtacgcgctcggtggtggtggttttaccagcatccacgtgagcaacgataccgatgttacggtagcggctaatcggagtagtacgagccataaagccctcgcaaaattagtgaagctaagattagaagcggtagtgcgagaaagctttgttagcttcagccatacggtgcacgtcttcacgcttcttaacagcagcacctttaccttcagcagcgtccaacagctcgccggccaaacgcagagccatagacttctcgccgcgcttacgggcgaagtctaccaaccagcgcattgccagagcgttacgacgggacgggcgaacttcgaccggaacctggtaagtagcaccgcctacacggcgcgacttcacttcgaccagcggagcgatggcgtcgagagctttctcgaagatttccaggggatcgctgttcttgcgttctttaaccttctccagcgcgccataaacgatacgctcggcaacggctttcttgccgctttccatcacgtggttcatgaacttggccaggatttggcttccgtattttggatcgtcaagcacttcgcgcttggctgctacgcgtcttcttggcatggataagccctcaaacggtcttcaggttcgctcggaatcggtgccctttcgggacgcctccgaccttactcttatcgactcagaaaataagatgattcagtgttacaaaaagccgctactacttaggcttcttggtaccgtacttcgaacgaccctggttacgacctttaacgccggaagtatccaaggagccgcgtacggtgtggtaacgaacacctggcaagtcttttacacgaccgccgcggatcagtaccacgctgtgctcttgcaggttgtgaccttcaccaccgatgtacgaggaaacctcgaaaccgttggtcaggcgcacacggcatactttacgcagtgccgagttaggttttttcggcgtagtggtatacacgcgagtgcatacgccacgacgttgcgggcagttctgcagcgcaggcacgtcggatttctcgacgatacgcttacgcggctgacgtaccagctggttgatagttgccatctactagctccactgttgtcttgcgacgctattgtcttgcaagaaaagcaaaatggcaggaacgaattcccgccaaatttaggggtacaagagtctaaagaggatcttgtccccagtcaaggcaaggccccgacctcccctctcatcgaaccgggacaaaactgcctcgatccgacgaatgggggctgccagggcccggacttatttatcgcagaactcagttaccgctggagttcagcgcttcggtcagtgcagcttccacttcactggcgcttacgcgcaacggcttgtcagcatcacggcggcgcttacgctcgctgtggtaagccaaaccggtaccggctgggatcaaacgacccacaactacgttttctttcaggccgcgcaggtaatcgcgcttgccggttaccgctgcttcggtcagtacgcgggtggtctcctggaaagaggccgccgagatgaacgattcagtcgacaacgacgccttggtgatacccaacagcacgcgagtgaacttggacacgaatttgtcttcggtcgccaagcgctcgttttccaccagtacgtgagtcagctccatctggtcgcccttgatgaaactggaatcgccggattcagcgatttcaactttacgcagcatctgacgcaggatggtctcgatgtgcttatcgttgatcttcacgccttgcaggcggtaaacgtcctggatctcgttaacgatgtacttggccagcgcacttacacccagcagacgcaggatgtcatgtggatcgcttggaccgtcagagataacttcgccgcggtttacctgttcgccttcgaagacgttcaggtgacgccacttcggaatcagctcttcatacggatcgctaccgtcgttcggggtaatgaccagacggcgcttgcccttggtttccttaccgaacgcgatggtgccgctgacttcagccagaatcgacgcttctttcggacgacgcgcttcgaacaagtcggcaacacgcggcagaccaccggtgatgtcacgggttttcgaagtttcttgcgggatacgcgcgataacatcaccgatggcgatcttcgcaccatccgctacaccgaccagggcgttggctggcaggaagtactgagcgattacgtcagtgcctggcagcaacagatccttgccgttgtcatcgaccatcttcacggctggacggatgtccttgccggcagctggacgatctttcgcgtcgagtacttcaatgttggtcataccggtcaattcgtcagtctgacgcttgatcgtgatgccttcttccatgcccacgtaggtcacggtacctttcatttcggtaacgattgggtgagtgtgcggatcccacttggccacgattgcgccagcgtcgaccttgtcaccttctttaaccgaaatcacagcaccgtacggcagcttgtaacgctcacgctcacgaccgtagtcatcagcgattgccagctcaccggaacgggacacagcaaccaggtggccatccactcgctcaacatgtttcaggttgtgcagacggacagtaccgccattcttcacctgaacgctgtcggctgcggaggtccggcttgccgcaccaccgatgtggaatgtacgcatggtcagctgggtaccgggctcaccgatagactgggcagcgataacgccgaccgcttcaccgatattcacctggtgaccacgagccaagtcacggccgtagcatttggcgcagatgccgtagcgggtttcgcagctgatcggcgagcgaacgatcacttcgtcgatgctgttgagttcgatgaactcgacccacttctcatcaaccagggtgccggcaggaacgataacttcctcggtacctggcttgaatacatcacgggcaataacacgacccaatacgcgctcacccaacggctctacaacgtcaccgccttcaatgtgcggcgtcatcagcaggccatgctctgtgccgcaatcgatctcggttacaaccagatcttgtgcaacgtctaccagacggcgagtcaggtaaccggagttagcagttttcaacgcggtatccgcaagacccttacgagcaccgtgagtcgagatgaagtactgaagtacgctcaaaccttcacggaagttcgcagtgatcggcgtttcgatgatggaaccgtccggcttggccatcaagccacgcataccggcgagctgacggatctgcgcagcagaaccccgtgcgcccgagtcggccatcatgtacatcgagttgaaggactcttggtcaacttcgtcgccgtgacggtcgatgactttctctttcgagaggttggccatcatcgccttggaaacttcgtcgttcgccttggaccaaaggtcgattaccttgttgtacttctcgccctgggttaccaggccggaggcgtactggctttcgatctctttcacttcatcagtggcagcactgatgatgcgggctttttcatccgggataacgaagtcgttaacaccgatggaaacgccagaaatggtcgaataggcaaaaccggtgtacatcaactggtcagcgaagatcacggtctctttcaaaccaaccacgcggtagcactggttgatcagcttggagatcgccttcttcttcatcggcaggttgacgacgtcgtacgacagaccttttggcacaacctggtacaacaacgcacggccgacagtggtgtcgacaatacgagtgttgctcacgctgccgccatcacgatcgttgacggtttcgttgatccgcactttgaccttggcgtgcagtgcggcttcgccggcacggaacacacggtcaacttcttgcaggtcagcgaacacacgaccttcgcccttggcgttgatcgcttcacgcgtcatgtagtacagacccaatacaacgtcctgcgacggaacgatgattggctcaccgttggctggcgacagaatgttgttggtcgacatcatcaacgcacgcgcttccaactgggcttccagtgtcagcggtacgtgcacggccatttggtcgccgtcaaagtcggcgttgtacgcagcacagaccaacgggtgcagctggatagccttaccttcgatcagtaccggttcaaacgcttggatacccagacggtgaagggtcggtgcacggttgaggagaaccgggtgttcgcggatcacttcggcgagaacgtcccaaacctctggcagttcgcgctcgaccattttcttggcggctttgatggtggtcgcaagaccgcgcatttccagcttgccgaagatgaatggcttgaacagctcaagtgccatcttcttaggcagaccgcactggtgcagacgcagggtcgggcctacggtaattaccgaacgaccggagtagtcaacacgcttaccgagcaagttctgacggaaacgaccttgcttacccttgatcatgtcagccagggatttcagaggacgcttgttcgaaccggtgatagcgcggccacgacgaccgttgtcgagcagggcatcgacagcttcttgcaacatacgcttttcgttgcgcacgatgatgtccggagcggacagatcaagcaggcgcttcaagcggttgttacggttgatcacgcgacggtacaggtcgttgaggtcggaagtcgcgaaacgaccaccatccaacggtaccagcggacgcaggtctggcggcagaaccggcagaacggtcagcaccatccactctggcaagttgccggaaccctggaaggcttccatcaacttcagacgcttggacagcttcttgatcttggtttcggagttggtttgcggaatctcttcacgcagacggccaatctcgtgctccaggtcgatagcgtgcagcagttcgcggacagcttcggcacccatgcgggcatcgaaatcatcgccgaactcttccagcgcttcgaagtactgctcgtcgttcagcagttgacctttttcaagggtggtcatgcctggatcgataacgacatagctctcgaagtagagaacacgttcgatatcacgcagggtcatgtccatcagcaagccgatacgggacggcagcgatttcaggaaccagatgtgggcaaccggcgaagccagttcgatgtgcgccatgcgctcacgacgaaccttggccagtgcaacttcaacgccgcacttctcgcagatcacaccacggtgcttcaagcgcttgtacttaccgcacaggcactcgtaatccttaaccgggccaaagatcttggcgcagaacaggccgtcacgctcaggtttgaacgtacggtagttgatggtttccggctttttaacttcaccgaacgaccacgaacggatcatctcaggcgatgccaacccaatacggatggcgtcgaactcttcgacttgaccctggtttttcagcaaattcagtaggtctttcaaggcctttcctcctggcggagcagagagcgggctaaacagccccgctctcgattcgcgtcacgtgttattcggtttccagatcgatatcgatgccgagggaacgaatttctttgatcaacacgttgaaggactcgggcatgcccggctccatacggtgatcgccgtccacgatgtttttgtacatcttggtccgaccgttcacatcgtccgacttcactgtgagcatttcttgcagagtgtaagcagcaccgtatgcttccagtgcccagacctccatctccccgaaacgctgaccaccgaactgagccttaccacccagcggctgctgggtaaccaggctgtacgaaccggtagaacgagcgtgcatcttatcgtctaccaagtggttcagcttcagcatgtacatgtagccaacagtaaccggacgctcgaacttgttgccggtacggccgtcgaacagctgcatctggccgctttctggcaggtccgccagtttgagcatggccttgatttcgctttccttggcaccgtcgaacaccggggtagccattggaacaccgccgcgcaggttcttcgccagatccaggatttcctggtcggagaaggtgtccagctcttcgttgcgaccgccgatctcgttgtagatctcgtgcaggaacttacgcaggtctgcaaccttgcgctgctcttcgatcatacggttgatcttctcgcccagacctttggccgcgaggcccaggtgagtttcaaggatctgaccaacgttcatacgcgaaggtacgcccaacgggttgaggacgacgtcgaccggggtgccattggcatcgtgcggcatgtcttcaaccggcatgatcacggagaccacacctttgttaccgtgacgaccggccatcttgtcgcccggctggatgcggcgacggattgccaggtaaaccttgacgatcttcagcacgcctggagccaggtcatcgccctgctgcagtttgcgcttcttgtcttcgaacttgtcgtccagcagacggcggcgatcaacgatgtaggcctgggctttctcgagctgctcgttcagagcatcttcagccatgcgcagcttgaaccactggccatgctcaagaccgtcgaggatttcgtcggtgatgtcctgacctttcttcagacctgcgccgccttcagccttgtggcctaccagggcagaacgcagacgttcgaaggtcgcgccttcaacgatacggaactcttcgttcaggtccttgcggatctcgtcgagctgggtcttctcgatggacagtgcacgagcatcacgctcaacgccgtcacgggtgaagacctgtacgtcgatgacagtacctttggtaccggtaggtacacgcagggaggtgtctttaacgtcgctggctttttcaccgaagatggcacgcagcagtttttcttccggggtcagttgggtctcgcctttcggagtgaccttgccgaccaggatgtcgcctgcgcctacttcagcacctacgtaaacgataccggcttcgtccagtttgttcagtgcagcttcacccacgttcgggatgtctgcagtgatttcctctgggccaagcttggtgtcacgggccacacaggtcagttcctgaatgtggatcgtggtgaagcggtcttcttgaacgacacgctcggacaggcagatggagtcttcgaagttgaagccgttccatgccatgaacgcgatgcgcatgttctgacccagtgccagttcacccatgtcggtggacgggccgtcggccatgatatcgctacgctgaacgcgatcacccttgctcaccagcggacgctggttgatgcaggtgttctggttcgagcgggtgtatttggtcaggttgtagatgtcgacaccggcttcgccagtttcaacttcgtcatcggcaacacgaaccacgatacggctggcatcaacggagtcaattacgccgccacggcgagccacgacgcaaacgccggagtcacgggctacgttacgctccatgccggtacctaccagcggcttgtcagcgcgcagggtcggtacagcttgacgctgcatgttggaacccatcaacgcacggttggcgtcatcgtgctccaagaacgggatcagcgacgccgctaccgaaactacctgcttcggcgaaacgtccatcaaggtgacgtcttccggcgccttgacggtgaactcgttcaagtgacgaaccgctaccagctcgtcgatcaggactttcttgtcgttcatcgtggccgaagcctgagcgatcacgtgatcagcttcttcaatggcggacaggaacacgatctcgtcggtgaccagagcgtctttcaccactcggtacgggctctcgaggaagccatactggttggtgcgcgcataagcggccagggagttgatcagaccgatgttcggaccttccggcgtttcgatcgggcaaacacgaccgtagtgcgtcgggtgtacgtcacgaacttcaaagccggcacgctcacgggtcagaccgcccgggcccagtgcagaaacacggcgcttgtgggtgatctcggagagcgggttgttctggtccatgaactgggacagttggctggaaccgaagaactctttcaccgccgcagccactggcttggcgttgatcaggtcttgcggcatcaggccttcgctttcagccatcgacagacgctctttgaccgcacgctcaacacgtaccaggccaacgcggaactggttctcggccatttcgcctacgcagcgaacacgacggttacccaggtggtcgatgtcatcgacgatgcctttaccgttacggatgtcgaccagggtcttcagtaccgcgacgatatcttccttgcacagcacgcccgaaccttcgatttcggtacgaccgatacgacggttgaacttcatccggccgaccgcagacaggtcatagcgctcagggctgaagaacaggttgttgaacagggtctcggcagcgtctttggttggcggctcgcctggacgcatcatgcgatagatctcgaccagcgcttccaattggttgctggtggagtcgatcttcagagtgtcggagatgaacggaccgcagtcgatgtcgttggtataaagggtctcgatgcgaacgacctgagccttggcgattttggccaggatctcggtgttcagctcggtgttgcactcagccaggatttcgcctgtcgccgggtgaacgataaccttggcggtagtgcgacccaggacgtagtccagaggcacttccagctctttgataccggctttttcgatctggttgatgtggcgcgcagtaatacgacggccagcctcaacaatgaccttgcctttttcatcctggatgtccaggacggcaatttcaccacgcagacgcgaagcgatcagctccagcttgagggtttcatccttcaggctgaatacgttggtggtgtagaaggcgtcgagcacttgctcagtggtatagccgagcgcgcgcagcagtaccgaggccggcagcttgcgacgacggtcgatacgcacgaacacgcagtctttcgggtcgaactcgaagtccaaccacgaaccacggtacggaatgatccgcgcggagtacaggagcttgccggagctgtgcgtcttgccgcggtcgtggtcgaagaacacgcccggggaacggtgcagctgggaaacgataacacgctcggtaccattgattacgaaggtaccgttctcagtcatcaatgggatttcacccatgtagacttcttgctctttgatgtccttgatcgctttgttcgacgattctttgtcgaaaatgatcagacggacttttacccgcaaaggtacggcgtacgtaacaccgcgcaacacgcattctttgacatcaaatgccggttcgcccaggcgataaccgacgtactccagcgcagcattgccggagtagctgatgatcgggaaaacggatttgaaggccgcatgcaggcccacgtcgcggaactgatctttggtcgctcccgcctgcaagaattcacgatacgaatccagctggatagccagaaggtacgggacatccatgacgtccggcaacttgctaaagtccttgcggatacgttttttctcagtatatgagtaagccatcagcgttccccagcttggtcacctgcttgtttggcccctccgacgggagcagccagaaaatcttgcaaaccccatggtttgcaccaccgcatcgggtggttacagcgcgttattggcggcgaccgagtcgacagccaagaacggaaaaaggccggtggcaagagccaccagccatcagccttcagcttaacgcttgggctggagacgcaaggtcgatgcttacttcagctcgactttagcgcctgcttcttccagcactgctttcgctttgtcagcggcgtctttcgacactgcttccagaacctgggcaggagcgccgtcaactacagccttggcttctttcaggcccagaccggtcagttcacgtactgccttgatcacgtttactttcttctcgccagcttccagcagcatgacgttgaattcggtttgctcttcagcagcaacagcagcaacagctgggccagcggaagcagcggcagcggaaacgccgaatttttcttcgaaagctttgatcagctcaacaacctgcagaaccgacatttcagctacggcgttgaggatatcgtcttgggagatagacattgctgtatttcctgaattgggggacggcctactcggccatcgaaataaacaaaaatacgcgagagaagtcgctcagccttaggctgcggcagcttctttttgctcgcgaactgcggccagagtacgagccagcttgctggtagcgccttgaatcacgctcatcagctgcgaaatggcttcgttgcgggtcggcagtgttgccagtacgtcgatttggttagctgcgaggaacttgccctcgaacgcagctgccttgatctcgaacttatcctgactcttggcaaattccttgaacaaacgggcagcagcgcctggatgttctttggagaacgcgatcagagtcgggccggtgaacacgtcgttgaggacactgtattcagtgtcagcaacagcgcgcttgagcagggtgttacgtacaacacgtacgtatacgccagcttcacgagcctctttacggagtccggtcatagcgcctactgtcacaccacgggcatcagccacgacagcggacagagcagctttggcagcctcgttgacttcagcgacgatggccttcttgtcttcgagattaattgccacgggtttaactcctgcttgttaccgtttcatctggccgaagccggatgtcgttttggtgtctgattcggtaaggaaccgggagcaccatctgcgtaggcttgtggtttaagacttgcgtcgcctacggtcttggatagcccccgccaggcagggaccccaattttttcaattggcgcgatcgctcgcaccaatttgtgtcttatacgtccagcgagccttggtcgatgaccagacctgggcccatagtggtgctcagggtaacgcgcttgacgtagatacctttcgaagaagctggcttgatacgcttcagatcagcgatcagggcttcaacgttttccttcaacttgacggcatcgaagccgactttgccaacggaggtgtgaatgatgccgtttttgtcagtgcgataacgaacctgaccagccttggcgtttttgaccgcagtggctacgtctggcgttacggtgccgactttcgggttaggcatcagaccacgtggacccaggatctgacccaactgacctacaacacgcattgcatccggggatgcaataactacgtcgtagttcaggtcgccgcctttcatttcggcagccaggtcgtccatgccaacgcgatcagcgccagcggccagagcagcttcagctgccgggccttgggtgaagacagctacacgtacagtcttgccagtaccgtgtggcagcacagtagcgctacgaacgacctggtcggatttacgtgggtcaacacccaggtttacagcaacgtcaacggactcgctgaacttgacagtcgacagctcggtcagcagggcagcggcgtctacaaagttgtaggccttgcctgcttcgattttgccggcgatagccttttggcgcttggtcagcttagccattacacaccctccacgttaaggcccatgctacgagcagaaccggcgatggtacgcacggctgcatccatatcagctgcagtcagatccgcgtttttggttttcgcgatttcttccagctgagcacgagttacggtgccaaccttaacggtgttcggacgagcggaaccgctagtcagaccagcagctttcttcaacagaaccgaagccggagtcgacttggtttcgaaagtaaagctacggtcgctgtatacagtgatgatcactggagtcggcagacctggctcaagaccctgagtacgggcgttgaaggccttgcagaattccatgatgttcacgccgtgctgacccagagctggaccgacgggtgggctagggttggcctgagcggccttcacttgcagcttgatgtaagcggtaatcttcttggccatgaggcactccaattacgggttcgaacgcctcgaaaggctccccggttacttgcgcgtttatcccagtgacgacaaaaccccacagcctaaggctgtggggttgggatgcttgctcagctagaccttctcgacctggctgaactccaactctaccggagtagagcgaccgaaaatgagcactgccacttggatccggctcttttcgtagttaacttcttcgacagtaccgttgaaatcagcaaacggaccatctgtaacacgaacaacctcacccggctcgaaaagcgtcttcggcttaggcttgtcgctaccatcagcaacacggcgcagaattgcttccgcctccttgtcagtgataggagcaggcttatcagcagttccgccgataaaacccatgacacgaggagtgtccttgaccaaatgccaagtaccttcattcatgtccatctgaaccagcacatagccagggaagaacttgcgttcgcttttgcgcttctgaccattccgcatttcaaccacttcttcagtgggaaccagaatttcgccgaagccatcttccatgcctgccagctttacgcgctccagcaaagagcgcataacatgcttctcgtaacccgagtaagcatgcacaacgtaccaacgcttagccacgggacacccttagccaacaatcaaggaaacaagccagccgagcagggaatcgagcccccacaacagcaacgccataaccagaacaacagccacgacaatcaatgtggtctgcgtagtttcttggcgagtcggccaaacgactttacggatttcggtgcgagcttcctttaccaggaccgcgaaagacttgcctttggcagtctgcaggcctacaaaggcagctacagcagcgagaacaagcaaagcgagtacgcggtacaggatcggcgaagcagaatagtactgattgccaacaacgcctacgaccaccaaggcaaccacagcgagccacttgaccagatcgaaacgagagctttgagcttcagccttaggagtcatctatgaagatcctgtgaaaagaaagccagacacaccacgtgaatctggcaggtcaggagggaatcgaacccccaacctacggttttggagaccgtcgctctgccaattgagctactgacctaaaacaaaatcaggccgaccattatgcaggcctgaaaaagactttacaacaaccaaccccactagacctgaaatcacctggcaacaacgccagacagaacaccttcaagccgaggcagctgttaaaacaaaggcagatattttcatatctgccttgttatatggagctcttgagcggatttgaaccgctgacctcacccttaccaagggtgtgctctaccaactgagctacaagagcaaaacacctgcacaacctgcaaacttggagcgggtagcgggaatcgaacccgcatcatcagcttggaaggctgaggttctaccactaaactatacccgcggagcttgcagctcacgctaaaaatggtggagggggaaggattcgaaccttcgaagtcgtagacgtcagatttacagtctgatccctttggccgctcgggaacccctcctaagcgagccggcattttacattacgccgaccttctgtcaagcattttctcatttaaaaatatgaggttagctgcattgaccttcgcttcacactattgacctagaaggtcttcactgcgaagcgggcgccattctatgcaaactattcgagagttgcaacgccttcgcacaacattattttatgttttaactcattgaattccttagcaaggttttcaaagggcagatcgtcagccaggcgtcgactttcaggggctacacgcagccagtagccagaggcatcagccgtattgagcaactggaccttgaccttgatatccaagctcgtgagtcgctgctcaacggactgcgcctggcgctggtccgcaaaaccaccgatgtacaggcaagtgttttgcgcctcggatgtttttgcgcgatccctgcgcaccaccgcatcagaagattcactgagtagtcggatgtcttgctgcgagcccttgtaaaggctcaagggcgtgacatccttagcgcgcaatggcgcttcttgctggtgccagatgtagtagaaggcgttgagaaccagtaaaagcaaaaacagccaacgcataatcacctcaggacaaaggacaagccatcgccaaaccgacaaagaccagatcgggcacgagccgcgcctggggcaccgcatccgctaccaaatcagcatccccgccggtcaggaacacggtaaagtcatccccccagtagctcctcgccaactccaactgagtcagtacaaaccctctgagcatcaacgtacagccgcgctcaacggcttctaccgtcgtacggcccggagagagacgctccagcgccctttcagcggcagcgtcgtcgtagcgtatcttgcgcgtgtgggttcgcaactgattgcgcataaggggcattccaggacaaatgaacccacccaagtgctcaccgtccacagcaataaaatctgcagtggcggccgtaccaaaatcaagcaccaggcaggccccacgcgcgagcttgaacccacccagcatcgccagccagcgatcaagcccaagacgttcgaaatcttcgtatccgttgcgcactcccgccatttctcgcgccggggccgcgcaggaaacgataacgccgaaagtgtcttgcaaggcagtgaccaacttgcttgtttcttccagggcacgaacgcttaccaatcggcaacgtgtcagtagaagcccagaaagcgctaccaggctctcaatcaacgccagatccgagcctacaaccccttctgcggaggtattcgccgattccgaatcaagcacacgccatttgataaagctatttccacagtcgagctcaagaatcatcacgcaacctcaggcttaactcaccaccactgtatattttctcaacaccattaacactcaagcgcaatgccccctggcgatctacacccagcacaaccccatcgacctggttgacacccgcggtaagggagaccggccggccctgccaggcgtgattctgctcccactctccctgaagcgcgacaaaaccgccttcccgatgccgctcaaggtagccttgcagctgccgccccagttccgacaccagaagattgcgattcaccggagcacccgtctcaagttgcactgaggtccattgctgatcaacctcatcagccctctgcatattcacgttgatacctattccgagaactacgtgacagatatccgcaggatcacctaccaactccagcaaaattccagcgattttcttctgccctaccaaaacatcgtttggccacttcagggcggcgccctgcaccccggactcgcgcaaagcctgcatgactgccaagcccacaaccaggctcagcccctccagctgtcgcagacctgactcaatacgtaaaacgagactgtaataaacgttttgcgcgaacgggctgatccactttcgtcccctcctacctcttcccgcagtttgttgctctgcgagcaccaggaacggcgccgcgcatccagcgtctaccagccgcaaagcttcagcattagtggagtcaatggaatcagatatatgaacgggccatgtcaaggatggcgtactctgcgaaatatcttcagcactcaagaacactagtggggatgccaattgataccccttgcctcgcaccttgtgaattggcagattcaactctgcctccaggtgctggagttgcttccatacagcactgcgactgacgccaagagcggcacccagtgcttctccggaatggaatcggccatctttcagaagtttcaacaacgtcagcatgcaagtatcgcctcacaatgaggcacgcatgatagccatgcgcagggtcattgcatagaaaggccggactttagcgctggaggccacgcacgcggatctcttcgcacttttcgaccgcccaaaacaaaacccctgactgcataagcaatcaggggttctggaatttaatcttgacgatgacctactctcacatggggaaaccccacactaccatcggcgatgcatcgtttcactactgagttcgggatgggatcaggtggtt

SEQ ID NO: 94 - DNA, 64291 bp, Pseudomonas nodulensis; identical to SEQ ID NO: 17

SEQ ID NO: 95 - DNA, 755582 bp, Pseudomonas nodulensis
  misc_feature (21059)..(21095): n is a, c, g, or t
  misc_feature (108556)..(108588): n is a, c, g, or t
  misc_feature (122549)..(122561): n is a, c, g, or t
  misc_feature (131716)..(131792): n is a, c, g, or t
  misc_feature (200493)..(200558): n is a, c, g, or t
  misc_feature (277622)..(277635): n is a, c, g, or t
  misc_feature (308597)..(308670): n is a, c, g, or t
  misc_feature (336788)..(336873): n is a, c, g, or t
  misc_feature (680048)..(680088): n is a, c, g, or t
aagtgctcgatggccgtcaattttccacattcaaggaagcccaaatagcatttgatcgatggcgtgaggtgtacaacttgcagcgccctcatcaagcgttggattacaaggtacctatggaccgataccgtgccagtccctgggcttatccgcagcaactatcggattttgagtatggaccagacgatgtgctggccaaggtttatcacagccgatttcgctttcagaaacgctacttcagcatcgctaaaggcttggttggccatcacatcgcaatacggccgaaccctgaaaagagcgggttctttgatgtctacttctgccatcactttctaagaacgttcgacgtgagcaaacctgactatggttaagaatgtgtccaccatgtccccgcacatgtgtccaccatgtgtccggtccatacaataccacataatggttcaagtccgtgtgggcccaccaaacaagaaagccgcgcattgcgcggcttttgtgtgtctggcaacctcacttcgcaaacaactgcccaatatccttgaacgccttgaactccagcgcgttcccgcacggatcaaacagaaacaacgtcgcctgctcccccacctgccccttgaaccgaatatgcggttccagcacgaagcgggtttgccgggcctgcaagcgttcggccaaggcgtgccaatcttcccagcccagcaccacgccaaagtgcggcacgggcacgttgtggccgtcgacggcgttggtgtgggctgattcctgggaggcggttttcgggtgttcgtgaatgaccaattgatggccgaagaagttgaagtcgacccaatgatcgcttgagcgtccttcttcaaggccaaagacttcaccgtagaaatgccgcgcagcggccaggtcgtataccgggattgccaggtggaaaggggcgagtgtcatcaggtcaaacctctatgggcgttaagtgccccgagtttagccttgctgccaacgatgaaaagacgatagtttttgcatcgagctcaaattatttcgatcaatcgagacgcccatgctgcgtgaactgaagacctttatcgccgtaacccgccacggcacgtttgcggcagcgggcatgcatatcgggctgacgcagtcggcggtgagtgcgcagattcgtcagttggagcaggcgctcggtgtgtcgctgttcgaccgtaccgggcgccaggctacgttgaatgctgcgggattgcgcgccttgccactggcgagagagatcctggagaccttcaaccgcatggcggtgccggtggatgcaaatgagtaccggggtgagttgaaggtgggcgccatcaccactgcacaaaccggtttgttgccccaggcactggtgcgtttgcgtcaggcggcgccgacggtggagtgcaagctgatacctggcgtgtccctggagctgctgagccaggtggacgccggtgagctggactcggcgatcatcatccgcccgcccttcgacctgcccaaggagctgcacgtgcaggtgctgcgcaaggagccgttcgcgctgatcgtgcctcacacgttggcgggtgatgacccgttgcagttgctggcgacgcagccccatgtgcgctatgaccgcgcttcctttggcggtcgcctggtcagccgattcctgaaggaacataaactcgacgtgcgggtagcattggaattggatgagctggaagccatcgtcaagatggtcgaatgcggcctgggcgtatcgctgattcctcaggccgggttgtggctggaacgctcgcccaacgtgcgaatcatcccattgggcagccggaccttttaccgcgaaatcatcctgctgagccgctacagtcaacgccacctgcccgtaccgcaactgttcacccgctgcctgctcgccgacgccaacctgtaagatgccaacacactgcccccccgcatcggagccctcgccttgcccgccctagatgaaatcgaccgccaactgatcgccgccctgcagatcaacgcccgcgaaagcgtggccatgctcgctcggcagttgggtatcgcgcgcaccacggtgacgtcacgcctggcacgcctggagaaaacccaggtgatcaccggttatggcgtgcgcctcgggcagcgggtggtcgatggtggtttgcaggcttatgtgggcattaccgtacaagcgcgctcgggcaaagaagtgttgcgccggttgagtgccatggcccaggtgcagcagttgtgcgcggtgagtggcgagtttgattatgtggcctggctgcgcacggattcgccggagcagttggaccaattgctcgaccagattggcagcgtcgacggcgtggaaaaaaccaccacatcgatcatcctcagtaacaaactggatcgcggccaaccaatctgaccaacagcttcgtcattctgactaaaaacagatcaatccgacgacactttgcgtcttattaacgaacgctacactccctaaactggctgccatcatttcctatactcagcgggtcgtgccccgccgagtcatcagccaggtcagccatgaacacgtccaacaaaagcaatcgccaccctgcagacggtaaaaaacccatcaccatcttcggcccggacttcccgttcgcctttgatgactggatcgaacaccccgccggcctgggcagcatccccgccgcccaccacggcgccgaagtggcgatcgtcggcgccggcatcgcgggtctggtggccgcctacgaactgatgaagctgggcctcaagccggtggtgtacgaagcctcgaaaatgggcggccgcctgcgctctcaggcctttgaaggcgccgaaggtatcatcgccgagttgggcggcatgcgctttccggtgtcgtcgacggcgttctaccactatgtggacaagctcggcctggaaaccaaacctttccccaatccgctgaccccggcctccggcagcacggtcatcgaccttgaaggccagacccactacgcgcaaaagctctccgacttgccggtactgttccaggaagtcgcggacgcctgggccgatgcgctggaagccggttcgcagttcggtgatatccagcaggccatccgcgaccgcgacgtgccgcgcctcaaggagctgtggaacaagctggtgccgctgtgggacgaccgcaccttctacgacttcgtcgccacctccaaggcgttcgccaagctgtcgttcctgcaccgtgaagtcttcggccaggtgggtttcggcaccggcggctgggactcggatttccccaactcgatgctggaaatcttccgcgtggtgatgaccaactgcgacgaccaccaacacctggtggtcggcggcgtggcccaggtgcccatgggcatctggcgccatgtgccgcagcgttgcgcccactggccggccggcaccagcctgagttcactgcatcgcggcgcgccacgcgcgggcgtcaaacgcattgcccacgccgccgatggccgtttcgccgtcaccgacaactatggcgacacccgtgaatacgccgccgtgctgaccacctgccagagctggctgctgaccacccagatcgaatgcgacgaaagcctgttctcgcaaaaaatgtggatggccctggaccgcacgcgctacatgcagtcatcaaaaactttcgtgatggtcgaccgcccgttctggaaagacaaagacccggaaaccggccgcgacctgatgagcatgaccctcaccgaccgcctgacccggggcacctacctgttcgataacggcgacgacaagccgggggtgatctgcctctcgtactcgtggatgagcgacgccctgaaaatgctgccgcagcccatcgacaagcgggtgaagctggccctcgatgcgctgaaaaagatctacccgaaggtcgatatcaaggcgcgcatcattggcgatccaatcaccgtgtcctgggaagccgacccgcacttcctcggggccttcaagggcgcgttgccgggtcactatcgctacaaccagcgcatgtacgcgcacttcatgcagaaggacatgcccgccgaacagcgtgggatttttatcgccggtgacgatgtgtcctggacgccggcctgggtcgaaggcgccgtgcaaacctcactgaacgcggtgtggggcatcatgacccacttcggcggcagcactcacccggagaacccggggccaggtgatgtgttcgatgaaatcgggccgatcgccctggcggattaaggagttgaacatgcgtgtcgccctgtaccaatgcccgccgctgccgctggatgtggccggcaacctcaagcgcctgcatcaactggcgcatgaggcctccgatgccgatgtgctggtgctgccggagatgttcctcagcggctacaacatcggtgccgaagccgttggcgccttggccgaggcgcaagacgggccgtcggcgcaggccattgccgaactggccagaagcgccgggctggcgattctatacggctatcctgagcgggccgcagatggtcagatctacaacgccgtgcagttgatcgacgcccacggccggcgcctgtgcaactaccgcaagacccatctgtttggcgacctggaccattcgatgttcagcgccggtgacgatgatttcccactggtagaactcaacggctggaagctcggtttcctgatctgctatgacctggagttcccggaaaacacccggcgcctggccctggctggcgctgagctgatcctggtgcccactgccaacatggtgccgttcgattttgtcgccgatgtcaccgtgcgggcgcgagcctttgaaaaccagtgttatgtggcctacgccaattactgcgggcatgaaggcgagatccagtactgcgggcagagcagcattgccgcgccgaatggacagcgcattgcccaggccggcctggatgaagccttgatcgtcggtacgctggagcgccaatcgctccttgacgcccgcagcgccaatcactacctgcaagaccgccgccccgagttgtacggcgcgctgcacaagccctgatccagccggtttgttagcataggcacattctatgtttcggaagtgcccatgcctgcgccggccccccctcatcaccttcacctgaccctggccaatggcctgcgggtttccttgcgtcatgccccacggttgaagcgctgcgccgccgtgctgagcgtggcggccggcagccatgatgtgccgttggcgtggccggggctggcgcacttcctggagcatttgctgtttctcgggacagagcgttttcccacggatgacgggttgatggcctacgtgcaacgccatgggggccaggtcaatgccagcacccgtgagcgcaccacggacttcttctttgaactgccggatgccacttttgccgggggcctggagcgcttggccgacatgctgacccatccgcgcctggcgctggaggatcaattgcgtgagcgtgaggtgctgcacgcggaatttatcgcctggtcccaagatgcacaggcgcaacaacaagtcgcactgttggaaggtttggcggtgaatcatccgctacgtggctttcatgcaggcaaccgcgacagcctgccagttgagcgagagacctttcagcaagccttgcaggaatttcacacgcagttctatcagagcgggcagatgaccttgagcctggccggcccacaatcgctggaggcactggaaaccttggcacagcggttcagtgaacagctgacttcagggcttctgcgcccgcaatccgtgcccccggccttgatgccggggcaagcgcagcactatcagcacattgccaatgatcatctgcaccaggtcatcacctgtgatgcgccccgtgaagcgctggagtttctctgcacctggcttaacgcgtcggcacccggcggattgctggccgaactgaaagcgcgacacttggcgagcgcactgcaggcgtcggtgctgtatcacttcgccgggcaagcagtgctggatatcgacattacgctcagtggtcccgctgaatcagccacacaagtcgaggcgttgctgtacgactggctgagctttttcgcacacagcgactgggctgcgttgcgcgaagcgtttgctctgctggccgctcgccaacagcaaacccaagacgccctggcattggcccgaaatgaccgccaggacctgtcggaacaggatgccgtcgcccttgaggccctgcttgaatcgctgcgcttgccaccctccgaacacccatggcaactgccgccgaataaccctttcctgcgcccgccggtgaaggaagaacgcgccggcctgattcgcggccagaccagcgcccaccgaggcttgcgcacgtttgcccaggatcgctcccgagggcgtcgtgatgcatcggcactggccttcagccaggcattggcggacgacagccacgaaggcgcgttgtatctgcaatggcaatcagctccgccacatcaggaaagcgcgttgcagtcgttgcgcgacaatgcccgccaggcgggtgtcgaagtgtcgttcgaaaacctgggcagtcactggctggtgaaaatggtcgggctacaggagccgatcccagcagttctggaagtgctggcgcaacgcctgggcgatccgcaagaggcacaagccgccgcgccgcccatgatcgccatccgcgaattgctcaaggcgctgcccgcttgctgcgccacgaccacgtccgaaacagccgcgtgggacaccgcacgttggcaaggcctggggctgggtttctctaccgcccatgaagccgcgatcaaaaccgctgcggcccgcctgccggggcaacctgcaagcctcaatcatgtcgcgccatccctcagcggccaacgtatttggcatgaagtagaagccgactcaaacgaagccgccctgctgctgttttgtccaacaccacgccaatccttggcggacgaagccgcctggcgactgctcggccatctgctccaggcgccgttctaccagcgcctgcgggtagagctgcaaatcggctacgccgtgttcagcggtatccgacagataaacggccagaccggcctgctgttcggcgtgcaatcgcctagcctgtccctgtcaggcattgccgatcacctgcacaccttcctgaagcaactgccagtactgatcgatagccgcgacgacttgggcaacctggccttggccgagcagttcagcgcacagacactgcccaacgcccaagccgccgaacttctgtggcacgcccatctggcaggccatccgtcggactacctggctcaacttcaaacccagatcagaacctgtacccgcgcagaattgcagcgtgccgccgagcagttgaacgacgccgcaggcggctggcgctgcgtggccaacggaccgcgcatctcgactacgtggcaagcggcagggtgatcattgccgcccctgcaaaaggctttctccctcaagacagcgctaacttgaaaagaattgagtaatattcccacgcacacatctgaacatctccgactggaggtggactatatgtattacttggtagtaaacgtcccatcccttcgtaggagtaagaatatgacctggtccaaacctgcttacactgatctgcgcatcggtttcgaagtcaccatgtacttcgccagccgttaattcgctgggtactacaacgcctcggtttgcccggggcgtttttgttttgagcttgatggagctgccatgtttgtccagattctaggttccgccgccggcggtggtttcccgcagtggaactgcaactgcgtgaactgcgcgggttttcgtgatggcagcctgcgggcccaggcgcgcacccagtcgtccatcgcgatctccgacgatggcgtgaattgggtactgtgcaacgcctcgccggatatccgcgcgcaactccagggctttgcaccgatgcaacccggccgcgccctgcgcgataccggcatcagcgcgatcatcctgatggacagccagatcgaccacaccaccggcctattgagcctgcgcgaaggctgcccgcaccaggtgtggtgcaccgacatggtccatgaagacctcagcaccggtttcccgctgttcaccatgctcacccactggaacggtggcctggcctggaaccgtatcgagctggacgccagcttcaccatcccggcctgccccaacctgcgcttcaccccgctgccgttgcgcagcgcagcgccgccttactcgccacaccgcttcgacccgcacccgggcgacaacattggcctgatcgtcgaagacctgcgcactggcggcaaactgttctacgccccgggcctgggcaaggtcgacgcgccattgctggagatcatggccggcagcgactgcctgctggtggacggcacgatgtgggatgacgatgaaatgcagcgccgtggcgtgggcacccgcaccggccgcgagatgggccacctggcgcaaaacggccccggcggcatgctcgaagtgctggaacagttgcccgagcagcgcaaggtgcttatccacatcaacaacaccaacccgatcctcgatgaagactcccccgagcgagcggaattggtgcggcgcaatgtcgaagtggcttacgacggcatgagcattgaattgtaggagctgacgagatgactgacacgccattgaccaccgccgaattcgaagccgccctgcgagccaagggcgccttctaccacatccaccacccgtatcacgtggcgatgtacgaaggccgcgccacccgcgagcagatccagggctgggtcgccaaccgtttctactaccaggtgaacatcccgctcaaagacgctgcgatcctggccaactgcccggaccgtgagatccgtcgcgagtggatccagcgcctgctcgaccacgatggtgcccccggtgaagacggcggcatcgaagcctggctgcgcctgggacaggcggtaggcctcgaccccgaccaactgcgctcgcaggaattggtactgcccggcgtacgattcgcggtagatgcctacgtcaacttcgcccgccgcgccagttggcaggaggccgccagcagctcgctgaccgagctgttcgcgccgcagatccaccagtcacgcctcgacagttggccgcagcattacccgtggatcgacccggccggctatgaatacttccgcacccgcctgggccaggcccgccgcgatgtggaacacgggctggcgatcaccctgcagcactacaccacccgcgaaggccaggagcgcatgctggagattctccagttcaaactcgacatcctgtggagcatgctcgatgccatgagcatggcctatgaactcaagcgcccgccgtatcacagcgtgaccgagcagcgggtgtggcataaagggatcaccctatgagctttgaccgcagcaagaaaccgacctggcgcccaggctaccgttaccagtacgagccggcgcaaaaaggccacgtgttgctctaccccgaaggcatgatcaagctcaatgacagcgctgcattgatcggtggcttgatcgacggcgagcgcgacgtggcggccatcatcgccgagctggagaaacaatttcctggtgtgcctgagctcggtgaagatatcgagcaattcatggaggtcgcccgtgctgagcactggatcacccttgcctgaaaagccggccaccggcctgccgctgtggttgctggccgagctgacgtaccgctgcccgttgcagtgcccgtactgctccaatccgttggactttgccgagcagggcaaggagctgacgaccgagcagtggttcaaggtgtttcgcgaagcccgcgagatgggggccgcgcagctggggttttccggcggtgagccgctggtgcgccaggacctggccgagttgatcgctgaagcacgcaaactggggttctataccaacctgatcacctccggcatcgggttgaccgagcagaagatcagcgacttcaagaaggccggtctggaccatatccagatcagtttccaggccagcgacgaacaggtgaataacctgctggccggctcgaaaaaagcctttgcgcagaaattggagatggcccgtgcggtgaaggcccacggctacccgatggtgctcaacttcgtgacccatcggcacaacatcgacaagatcgaccgcatcatcgagctgtgcattgcgctggaggcggactttgtcgagctcgccacctgccagttctacggctgggcacagctcaatcgggtgggcttgttgccgactcggcaacaattggtgcgcgccgaacgcatcaccaacgaatatcgcgccaagctggaagcggaaggtcacccgtgcaagctgatcttcgtcactccggactactacgaagaacgcccgaaagcctgcatgaacggctggggcagtatctttctgacggtgacgccagacggcaccgccctgccctgccacggcgcccgacagatgccggtgcaatttcccaatgtgcgcgaccacagcatgcagcacatctggtacgactcgttcggcttcaaccgctttcgtggctacgactggatgcccgaaccgtgccggtcatgcgatgaaaaggaaaaggatttcggcggctgccgatgccaggccttcatgctcacgggggacgcgagcaatgccgacccggtgtgcagcaagtccgagcagcacggcatcatcctgcaagcgcgggaagaagccgaatacgccacccagaccattgagcagttggcctttcgcaacgagcgcaactcacggctcatcgcaaaaggctgacggcctcagcgcttggcgatgatgtacaccgcgtgcacgatgcccgggatgtagccgcacagggtcagcaggatattcagccagaacgcgccgccgaaacccacttgcaggaacacacccagtggcggcaacagaatagcgatgatgatacgaatgaaatccatgggatcagctccagaaaatcggctcgtgtgagccgtgtagctaatcgaccttgggcattcgtgagggttcagtgggatctggcgttgggccatccaggcaaaaaaacgcccccggccaaaagaatcaggccggaggcgctgcgtagaccgcgagacggttcaggaataagggttaaacggcgatacccttgcggcattgcagttgggcggtacgcacgcgggagaaggcgcgggccaggcgcaggagcatttcgtcgatgttgcttttgctcacggtcagggccggggtgaagcgcaggcagttgggttgcggagcttgaaggatcaggccttcgtgcagcgccgcttttacaacagcatccgcagaatcatccgacaacgtcaggccccacatcaggccgtggccacgcagttgaccgtggtcgtagcggtaggccaggcgggcaagaccttcgcccaggtacaagccggtctcacacacgtgatccataaagccgtgctccagcacggagtcgagtactgccagcccggccgacgccatcagcgcgttgccatggtgggtgccttccagctcgcccacttcgaagcaacaggccttgccgcgagccaatagcgctgcaacgggaaccccaccacccaggcctttgccgagggtgatgatgtcggcacgtacgccgtattgctgctcggcgagcaaagtgccgcagcggcccatgccggtttgcacttcgtcgaggatcagcaagatccccagttcacggcacaggcgctcgacgcccttgagatagtgctctgtcgcggggattacacccgcttcgccctggatcggctccagcaggatggcgacagtttgtgcgtcgactgccgcatgcagggccggcagatcgttgaagggcacatggctgaaacccggcaactgtggttcaaaacggttttcaagcgtacttgccgacgccgacatcgccgcaaagctacggccatggcaaccaccgctcgcgctgatgatgcgataggcgccgccgcgatgcagttggccccatttgcgcgccaacttgatcgcggcttcaacggcttccgcgccgctgttaagcaggtaagcctggtcactgccggtgcgatggcacaggcgctcggcgaggttgagttgagcgcggttatgcaagccgttgcctgggttgatcagcgcctgagtctggtcggccagtgccttgatcaacacctgcgggctgtggccgaggctgttggcggcgtttccctggctgaaatccaggtaagccctgtcatcgctgtcccacagccaggaaccctggccgcgcacgaagacttggggtggccgcgctacggagggcatcagggattcgttgggaggattatcgctgggcgtctccagaactaaatcgtccaagctcggcgcggggcgacggaacagattcatgattcacccccaatagtaatcggaccttggtcgctgcgacccgtcattattgccttgaggttttttgccttgcctatgtaaacgctatcaacataaacgctgttcattgcccgatccggccctgtaagccctgcgaataggcgctagactaggcgcctcgggggccagcggccatttcgattttccagctttttcgataagtaagtcttatggatttcaagcaactgcgttatttcgtcgcggtgtatgaggaaggccacgtaggccgtgccgccgagcgtctgtcgatctcccagccggcgctgtcccagcagattcgccagttggagcagaacctggatgtgagcctgttcgaacgcagcagcaagcgcctgctgccgacactggcggcgcatacgctgtacaaccacgccctgccattgatcgatggcatgcagcaggcggttgaggccctgcgcaacttcaagggccaggcgatgcgcacgttggccatcggcgtgctgcaaaccgtgcacaccagcctggtcccgcagatgctcgagcgcgtgcgcaaggcccagccacatttggtggtgcagatctacgaattgactggaattgagattgagcggcggctactcaacggctcgctggatatcggcatcagctacttgccgccacgccagccagggttgcacggcgtgttgttgtacgaagatgagttgaaggtggtcatcccagaagaccatcccttgcgcgaattcaagaaagtctcactgaagcaggccgccgagttgccgatgttgctgctcggggaagaattccaggtccggcagatctggcagggccaactgtccaacctcgggcggcgcccgcaagtgcaggcagagctcaataccatggcgggaattctcgatagcctgcctcataccaagctggcgacggtactgccggggcgctcccaggatgaacacaacagccaggcgctgctgtggaaacccttgagtgaacccagggtgccgctgaaagtcggtttggtatgccgcgatgtgcaacgccagcaggcgacggtggcgttgctgcgcaccttgctggaagacgtgatgaatgccccgcaggcgcctgcctgactttttcgcgggcaaaagaaaaccccgccgaagcggggctttgcagactgtttccctgacatccatttcactccgccgtcctggcagaatcctacgtgtccgtgttgttgctttgcgcttcctgcgcgacgtccatgtgaagtagattatccgtggatccaatatggcgatagaggacgaatagcagtacgtcatgtaagagaatgcttacacgccctccaagcctttagaacagggcttcatccagcaaaaacagtgattcgctaccggcttttaccgacgcactcagcgagtggatgcgcggcaacaggcgcgcaaagtagaagcgtgcagtcccgagcttgctggcgtagaagtcttcttccgactccttgcccaacgcggccttggccatgcgcgcccacatgtaggcatacgccatgtagccaaaggcatgcaggtactccaccgacgccgcgccgatctcattcgggttggtcttggcgcggtccagcacccaggcggtcaactcatccaggttatccaccgccacgcccagcggcttggtgaattcggccagctcggcccccgccgaggcaatgaacgcgcggatctcatcggcaaacagggtgtagaacgccccgccactgccgacgatcttgcgccccatcaggtccagggcctggatgccgttggtgccttcatagatctgggtgatgcgcacatcgcgcaccagctgctcctggccccactcgcgaatataaccgtggccgccaaatacctgttggcccagcacagtggtttccaggcccaggtcgctcaggaatgccttggccaccggcgtcagcaacgccaccaggttatctgcacgctcgcgggctgcggcgtcgtcgctgaacttggcgatgtccagttgcgtcgccacgtaggtggagaacgcccggccaccttcgttggcggctttcatggtcagcagcatgcgccgcacgtccgggtgcacgatgatcgggtcggccattttgtctttggcctgggcgccggtcggtgcacggctttgcaggcggtcgcgggcgtattcgatggcgttctggtaggaacgctcgccggacgccaggccctggatacccacccccagacgctcgtagttcatcatggtaaacatcgccgccaggcctcggttcggctcgcccaccaggtaaccaacggcctcgtcgaagttcattacgcaggtcgccgacgcctggatccccatcttgtgctcaatggagccgcagctcacagcgttacgggcacccaggctgccgtcggtgttcaccatgaacttcggcaccaggaacagcgaaatccccttgggccccgccggcgcgtccggcagcttggccaggaccaagtggatgatgttatcggtgaggtcgtgttcaccgccggtgataaagatcttggtcccgctgactttataggaaccgtccgcctgtggctcggccttggtgcggatcatccccaggtcggtcccggcgtgggcctcggtcaggcacatggaaccggcccactcaccggaatacatcttcggcaagtaagtggccttgagcgcttcgctggcgtgggtgttgatcgacacacaggcgccagacgtcagcatcgggtacaggccaaaggccaggctcgacgagttgatcatctcttcgacctgggccgacacggccttgggcatgcccatgccgccgaacgcaggatcaccaccgacacccacccagccgccttcagcataggttttgtaggcctgtgggaaaccgtccggggtaaacacggcggtgttgtcccaacggcaaccttgttcatcgccaccacggctgagcggggcgatggatttggcggtgaccttgccggcttcttcgaggatggcctctacggtttcggcgtcaacggtgtctgccaatgccggcaactgggcccaagtggtggcgacctcaaagacttcgttgaggacgaagcgcatatcacgcagcggcgctttgtaatcagccatggcaaacctcgtgagaacgtgaaaagtaattcggtaagagtcggttttacaggctcagagtgtacccgaacaacttttcagacacatagggtccacttgtgactgattggtatttttaagtcattaccacgcaaacgcctccgcaggcagactcatcaggcattcgctgcccgcttccacggccgcgcgatgggtagccgtacgcggcagtagacgcttgaagtagaactcgcacgtggccagcttggccttggcaaaatcgccatctggctgttcaagggcagcgatcgccattcgcagccacaggtacgcgagcaccacgtaaccgctgtacatcaagtaatccaccgccgccgcgcccacttcatcggggttcttcatcgcggccatgccgaccttcgtggtcagctcaccccattccccgttcaactgattgagttgcgccacatagcccttgagctgagagtgctcggcattcgcggcacagaacttatgcacgattttggtaaacccacgcagcaacttgccctggctgcccagcaccttgcgccccagcaggtcgagggcctggatgccgttggtgccttcatagatcggcgcaatccgcgcatcgcgcgccagctgctccatgccccattcacggatgtaaccgtggccgccgaagatctgcatgccgtggttggtcacctcaaggccggtatcggtcatgaaggctttgcagatgggcgtgaggaacgccagcaggtcttcggcatcctggcgctggccggcgtcactgctcaggtgcgcggtgtcgagcaattgcgcggtgaaataggtcagtgcgcggttgccttcgttgaaggccttcatggtcagcagcatgcggcgcacatcggggtgcacgatgatcgggtcagcagctttgtctggggccttggcgccggtcagcgcgcgcatttgcaggcggtcgttggcgtatttgatcgcgccctggaaactcgcttcgccattgcacaggccctgcatgccggtgcccaggcgcgcgtggttcatcatggtgaacatgcagttgaggcccttgttcggctcgccgatcaggaagcccctggcgccatcgaagttgagtacacaggtggcggacgccttgatgcccatcttgtgttcgatggaaccacagtgcaccgcattgcgctcgcctgtgtcggcatggaacttgggcacgataaacagcgagatacccttggtgcctgccggcgcatccggcagcttggccagcaccagatggatgatattggcgctcatgtcgtgttcgccggcggagatgaagatcttgctgccggtgaccgcatagctgccgtctgcctggggcacggcacgggtcttgatcaggcccaggtcggtgccgcaatgagcttcggtgaggcacatggtgccggtccattcgcccgctgtgagcttggtcagataggtgtctttttgctcggcggtgccgtgggcgtggatcgccgacatcgcgccgtgggtcagccccgggtacatgccccaggaggtgttgctggagccgatcatctcgctcagcaccaggccgagcgactgcggcaagccctggccaccgtaggccgggtccgccgccacgccgtgccagccgccctccacgtactgggcgaaggcttccttgaagcccttgggcgtggtgaccacgccattgtcgaaatgacagccttcttcgtcgccgctgcggttgagcggcgcgagtacgttctcgcagaatttcgcgccctcttcgaggatcgcgccgaccatgtccgggctggcgtcggtggcacccaacgcggcgtagtgaccgtggaaatcaaacacgttgtcgatcagaaagcgcatgtcgcgaaggggagctttgtactcaggcatggcaatgtctccgtcagcagatggtttcaacctactgccggccaacgcctgggacaatcactgtagaaccgctgaatacaccgccatcactcaaccggcagcgctctgcatgcgcaccgcgccacgccgggtctgcccggacgccaccacgcagttacgcccggcgcccttggcggcgtacagcgcctggtcggcggacttgagcacttcctcgggggagcgctgctcggcctggcgttcggccacgccgatactgatggtcaccgagacactggaggcgccgctgcccgaacggcgctggcgaccctgttgatcgtcctgggggcggtccgaattacgcagcttgatgtcgtagtcggcgatgatctcgcggatctcctccaggtgcggcatgcattcatccagggtcttgccggcgaacaccacggcgaattcttcaccgccgtagcgataggcgcgcccgccgccgttgaccttggacagcttgctcgccaccagccgcaatacctggtcgcccacgtcatgaccatgggtgtcgttgaaacgcttgaagtggtcgacgtcgctcatcgccaacacatagttgcgccccagccgctgcatgcgctcgttcagcgcacgacgccccggcaagccggtcagctcatcgcgaaaggccatttgataagcctcgtgggccacaccggcggcgatcatcagcatcacctggctgcacatgatattcagggtgaagggcaggatgaacgtctgcggcaacatccagaacaggcccagcaaccccaccagttgcgccgcatgcagcgggcgcggctggtaccagtattgcgccgccagggtcaggaagccgatcaggaacatcgggtacgacagctggatcaggctcatccagctgccatgcagcgccggccagcggatctccgccagccagttcagcaccgcctggggataactctgctccagcgccagggccacgctgcccaccgccagcaacaccgcgccacgggctacaaagtcacgaaacaggtgggtcttctcctgccacagcgcgtagatgctgaacaacaacggcagcagcaggcagcacaggtggaacaccacggcggcgtcttcgcgcacgcggccattgtcgcggtagaagtcggtctgggtatcgagcaggaagtaggcgatgtataccgtgatcatcaggaacagttcacgctggcggcggtacaccgcgcagtacgaaccaccgagcaacagcaccagggtcggcaacacattgaacagtgaggtgaagaaaacgttgaggtccttgacgtacgcagccgagagcccggccagcaagagcagcaacgaaggtagaaaatgactgaaacgtacagcggacacgcgtgacaagggtaaaactccgacccgcaaaaaatgatggcactgtgcctctatgtggacagttaagcacaacctgacacacatgcatcacattgccatcactgtaacggcagccggcggtaatccctgagtgctgcggtgtggttttttatcgcccacaaaaaagccgccgcccccgtagaggagcggcggctctggaagtgaacccggtaaggcttagtaagccaggccgaagtcttcttctttcatgtccatcaggttgttggcacccgacagcatggtggctttgtgggccagggtacgcggcaggatgcgctggaagtagaagcgcgcggtctgcagcttggcggtgtagaacgcttcttcggtggtgccggcagccagtttctcggccgccaggcgcgccatgtcggcccagaagtaagccaggcaggcgtaaccggagtacatcaggtagtccaccgaggcggcacccacttcttcgcggtctttcatcgcggccatgccgaccttcatagtcaactcgccccactctttgttcagcgcagccagcggtgcaacgaactctttgaccgcttcgttgccttcgttggcctggcagaacttgtgcacgatcttggtgaagcccttgagcgcttcgccttgggtcatcagcactttacggcccagcaggtcgagggcctggatgccggtcgtgccttcgtacagcatcgaaatgcggctgtcgcgaacgttctgctccatgccccactcggcgatgaagccgtggccgccatagatctgcacgccgtggttggccgattcaaagccgacttcggtcatgaacgccttggcgatcggggtcatgaaggccagcaggccatcggcctgtttcttggcgtcttcgtcggtgccgtatttgacgatgtccacttgcttggcggtgaagtacaccatcgcacggttgccttcggcaaaggccttcatggtcagcagcatgcggcgcacgtcggggtgcacgatgatcgggtcggcggctttgtccggggctttcgggccggtcagggagcgcatttgcaggcgatcgcgggcatatttcaggccaccctggaagccgatttcggcgtgggacaggccttgcagcgcggtacccaggcgagcggtgttcataaaggtgaacatgcagttcaggcctttgttcgccgggccgatcaggaaaccggtggccgcgtcgaagttcatcacgcaggtggcgttgccgtggatgcccatcttgtgttccagggaaccacagctcacggcgttgcgcgcgccaatcgagccatcggcgttcggcaggaacttcggcacgatgaacagcgagatgcctttggtgccggccggtgcgtccggcaggcgggccagtacgatatggacgatgttgtcggccatgtcgtgttcaccggccgagatgaagatcttggtgccggagaccttataggaaccatccgcctgaggctcggccttggtgcgcagcatgcccaggtcggtgccgcagtgtggctcggtcaggcacatagtgccggtccattcgcccgacaccagtttggtcaggtaggcctcttgctgctcgggcgtgccgtgctcggagatagtgttcatcgcaccgtgggacaggcctgggtacatgccccacgaccagttggcggcgccgaccatttcgctcacggccaggcccagggattccggcaggccctggccgccgtgctccacgtcgtgggccaggcttggccagccgccttctacgaattgtttgtaggcttctttgaaaccggtaggggttttaacgcccgactcactccaggtgcagccttcgatgtcgcccacgcggttcagcggtgccagcacttgctcacaaaacttggcgccttcttcaaggatggcgtcaaccatgtccggggtagcgtcctggcaagccggcaggctctgatagtgcgcttcatagccaagcagttcgtcacgaacgaagcgaatatcacgcaagggggccttgtagtcaggcatagcgataaacctctgctgatgtatctggaatgaacaaccgcgtggaagtgttggggcggtcaaacaggtgtttgaaacatacgtttacgacctggggatgtcaagcgtcgtccggatgccgtttgtcatgacgcgggtcaatggcgcgcacggtaacgcttgcggctagacgccacatgactgggggagtgtagaagttcagaaggacgacacagtaaaaatgtgggagggggcttgcccccgatagnnnnnnnnnnnnnnnnnnnnnnnnnnnnnnnnnnnnnctatcgggggcaagccccctcccacattttttagcgccagcagatcaggcgtaggtgtcgatcagggtaccgagcatttcatcggaagccttggcgactttagcgccgagttccacttggaacttgccttgggccatttcaaccatgttgctggccgagttggacggctgggcgcggtcgttggcttgcagacggtcgctttgcgcgtccgatggctgagtggtcgcggcgctggcaattctgccggcggcctgatcgacacggttctgcccggactgaatgctgctcaggcccgagtaaaacgcgctgcttccagagatttccatggcgtaagcctgcctttagagaatcgtgaagttgaattgaagcagatatcccgtcaaagggctcgtcaaaaacactaatggcataatgccttgtcgatagccaaaatcagtcaagcaggtccagttgcaagtactcggcaaccgcttcagccccggcgtgcttgagtttcggcacacgccccaagaatggcgcaggcaggcgctcagccagggtggcaaggttttcttccagacgggaggtcttggggtcgatgatattcgccacccacccggccaacggcaggccatcccgggcgatggcttcggcggtcagcaaggcatggctgatgcaacccaggcgcacccccaccaccaggatcaccggcaatttcagcgccatggccaggtccgacatattcgcctggtcagccaatggcacgcgccagccaccggcgccttcgatcagggtgaaatccgcttgccgtgccaggatctgctgcatgggcttcaacaacgattgcacggtgagcgagaaacccgcctcccgcgccgccagatggggtgcgatggccggttcgaacgccaccggattgacctcggcataactcaacggcagcgagcattcggacagcaacgccaacgcatcggcgttgcgcaagcccttgggcgtgacctggcaaccggaggccaccggcttacccgccgcggtgcttctgccggcttgccgcgccgcgtgcaacagaccggcggcgatggtggttttgccgacatcggtgtcggtgccggtgatgaagtaggcggcgctcatagaggtttctccagtacggcatacaccacttggtaagtcgccggcaggccttgggcctggcggaaccgctcatacgcgtgcaccagtgcaacaatccgcgcgcgccccgtcaacccaccggggcgaccggggttgaggttatgcgcgcccagggccttcaattcgtgggtcaggctgcgcacatccgggtaatgcaacacatgaggacggcgctccaggctcaccacccgcaggccgctggccgcacacacttgttgatacgcctcgaaggtgcggaagcgattgacatgcaccaggccatccgccgcacgccagctctcgcgcagctcttccagggtgcccgtgcagagactggcgaaggccagcacaccgcccggttgcaacacccgatgggcctcgctgagtaccgcctcgaaattcgcacaccactgcaccgcgagggacgagaagatcagctgcacgctgtcagctttgagcggcaagcgttcggcgtcgccggcgatgaagtgctcggcgccacccagggggcgtgcgtggttgagcatgccttcggcgatgtccaacgcgatgccttggctggcgggccagcgctcccccagcacacggctgaaataaccggtgccgcagcccatgtccaaccaacgttgcggcgcggtatcggccggtaagcgcgccagcaattggcagcccaccgcccgctgcaactcggcgacgctgtcgtaactggcggcggcacgggaaaaggacgccgccacctggcgcttgtccggcaacgcacccggcagcggggcgtgggataaatcagtcatcgacgcactcatgcaaaaaagcctggatggcccccgctacaccgtgagggtcttccagaagaaaagcgtggccggcctgttcaatcaggccgatttcaacatccggcagcagggccagcaggtcgctggcggcttcggcgggcaccaacccatccaggccggcgaacaggtgcaactgcgggccgcgataggccaataaggcttcacgggtatccaactgggcgagtagctcaaggccgggcatcaacacactgggcggcgtgttcggcgcgctactgaccagcaggcgcgacagcccgcgcgggtcttcggcacccttggcgcacaacaaaccgaagcgtttgagggtgacttgggagtcggcatggcagccggcgaggaatgcatcgaaggtctcggcgggcatcgcgcttggccagccagcgtgggcgacgaaacacgggttactcgccagcgtcagcaggccgcagcaacgttcgccgcgccgcgccgccagttccgaggccagcatgccgcccagggaccagccgcccagccaggcgttgtccggcagcgtagcgtcgagttcgtcgagccactcgttcaggtcgctggagtccagtgcaggcaacggttcgatctgcacctgcaggtgctcgtccaaaccttgcaaggcggcggccaacggctccagcggcgatacaccgaggccccagccgggcagtaatatcagtcgatcacgcatggcctcgctccgaactgcctaacaagcggaaacacgcttccaatgcgtttaacaatagctgcacctgcgccgcgctgtgggctgccgtcaatgtcacgcgcagacgcgcgctgccggcgggcacggtgggtgggcggatcgccgtcaccatcaggccgcgttcacgcagcatctgcgacaggcgcacggccttggcgctgtcgccgatcaggatgggttggatcggcgtaaagctgtccatcagctccagcccaatctgctcggcgccctggcggaactggcggatcaggcggttgaggtgctcgcgccgccaatgttcgctgcgcaacagttccaggcttttcaaggtggcacaggccagggcgggcggttggctggtggtgtagatgtacgggcgggcgaactggatcaggctttcgatcagctcttcactgccggccacaaatgccccggccgtgccgaacgccttgccgagggtgccgaccagcaccggcacgtcctcctggctcaggccgaaatgctcgacgatcccgccgccgttggcgcccagggggccaaagccatgggcgtcatctaccatcaaccaggcgcctttggccttggtttcgcgggccagcgcgggcaggtcggccaggtcgccgtccatgctgaatacaccatcggtgaccactagggtattgccggtagctttctccaggcgcttggccaggctctgcacatcgttatgcaggtaacgattgaaacgcgcacccgagagcaagcccgcatccagcagcgacgcatggttgagacggtcttccagcaccgtatcgccctgccccaccaatgccgtgaccgcgccgaggttggccatgtagccggtggtaaacagcagcgcacgcgggcgaccggtgaggtcggccagggcttcttccagttcatggtgtggcgtggcatgcccgaccaccaggtgcgaagcgccgccgcccacaccccaacgcgaggcaccggcgcgccaggcctcgatcacctgcgggtgattggccaggcccaggtaatcgttattgcagaacgccagcagcggctggccgtccaccaccacttccgggccctgggggctgtcgagtagcgggcgttggcgataaaggtgttcggcacggcgggcagcgagacgcgcggcgagatcgaaagacatgcaggcctcgattaaacagatgtaggcggtcaagaatgtggcggggatccagtgtgggagggggcttgcccccgattgcaatctgtcagttgatgcaggtgtcgactgacccatcgctatcgggggcaagccccctcccacaccagccgtttcccacaggtggctggcatttcaatcaaacaacggcgttatagaactgctcgctgctcttctgctccaccaacgcctgctcgattgcggcctggtgcacttcatcggcatgttcttcacgggcttccggcaggatgcccaggcgcgcaaacagttgcatgtccttgtcagcctgcgggttggcggtggtcagcaacttgtcgccgtagaagatcgagttggcaccggcaaagaacgccaacgcctgcatctgctcgttcatcgcttcacggccggccgacaggcgcacatgggacttcggcatcaggatgcgcgccacggcgagcatgcggatgaagtcgaacgggtcgatgtcttcggcgttttccagcggcgtacccgccactttcaccagcatgttgatcggcaccgactccggatgctccggcaggttggccagttggatcagcaaattggcgcggtcgtcgagggactcgcccatgccgaggatgccgccggagcagatcttcatccccgaatcacgtacataggccagggtttgcaggcgctcgctgtaggtgcgggtggtgatgatgctgccgtagaactccggcgaggtgtcgaggttgtggttgtaatagtccaggccggcctgggccagggcttcggtctggtcctggtcgaggcggccgagggtcatgcaggtttccaggcccatggcctttacgcctttgaccatctgcaacacgtagggcatgtctttggccgacgggtgtttccaggcggcacccatgcagaagcgcgtcgagccgatggctttggcgcgggcagcctcttcgaggaccttctgcacttccatcagcttctctttttccaggccggtgttgtagtggcccgactgcggacaatatttgcaatcttccgggcaggcgccggtcttgatcgagagcagcgtcgacacttgcacacggttggcgtcgaaatgcgcgcggtgcacggtctgcgcctggaacagcaggtcattgaacggctgcacgaacagcgctttgacttcggcgagggaccaatcgtgacgcaaggtggcggtggtgctggcgctcatgggcgattccttgattatgctttggcaagcgctgcgggaagggcaatacccacaggcacgacacggatgctcggcatatttaaggaagattcatgcactgtcaaccgagacacaaacaccaggtttacatctggttaaataacatacaaacctgtttaatctgtgatgaagcgacacaatccgcccattgtgtgtgcaacgtctgcgaaaccgagctgccctggctcatggagcactgcgatgtgtgtgccctgcccctgccgatggagggtttgacttgcgggcaatgccaaaaaaatccccctgcgtttaaacaggtcatcgccccctggtcctacagctttcccatcgacagcctgatcagccgcttcaagcatcaggcacgctggcccctcgggcagatgctggcgtggctgttggcgcaacacctgcaacatcgcttcgataacaccggactcccccgccccgactgcctgctaccggtgcccatggcccgcaagcgcctgcgcgaacgcggctacaaccaggcgttaatgttggcacgctggctcagcagcgacttgaacattccccacgatgaacagctgttgttacgcccccatgaaaccgtggcccagcaggcactcgacgccaggacccgtaaacgcaacctgctcggtgccttcgccctggcgccccacgcccaggtgcagggccgccacttcgccctggtcgacgacgtgctgacgaccggcgccacggcccatagcctggcgcggttattgatgaacgccggtgcgaagcaggtcgatgtgtattgcctggcccgcacacccaaaccgggcagttgacttgactccagcccaccttgcccgcaacgttcggctcatcccagccaagcgtatccacatgtctctgccaacctccctcagccaacacatcatccgccgcccccagcgcattgccttactggcacatatcgccgagcagggttccatcacccgtgcggccaaaagcgcaggcttgagttacaaggcggcgtgggatgccatcgacgagctgaacaacctggcacaaaagccgttggtggaacgcagcgtgggcggcaagggcggtggtggcgcgaagctgacggccgaaggtgagcgcgtgctgcgtctttaccagcgcctgcaagtgctgcaagccgaagtgctgggttccgatgaagccgccagcgacttcaacctgctcggccgcttgatgctgcgcaccagcgcgcgcaaccagctgcatggccaggtgatcgccatcgagcagcagggccgtaacgacctgatccgcctgcaactggccggtggcctgagcctggacgcgcagatcacccatgacagcacgcaacgcctggaactggaaaccggcgtggaagtggtggcgctgatcaaggccggctggctggaagtgctcgcatccgagcaagctgcaacacctggacacaattgcatgagcggcaccgtcgacgtcattctcgacgccgacgacggccccagcgaagtgcgcattgccctgcccaatggccaggttttatgcgccctggcgcggcccgaggcactcaaggacgtgggcgccgccgaaggtaaaaccatcaccgtgcaattcgcgccaagcaatgtgctgctcggtacgccggtgtaggcgcagcccgccttcaaactgcaacaatttcgtcacgcccgctccttatggtgtctgcaaaaaccgcagggagcctgagatgagcctattagaagaaaaccaagccaccgacctggaacagatggtcggcctcacccgccgccgctttatcggcgccggtgcgctgtgcggtgccgcgatgttcctcggcggcaacctgctgagccgcagcgccctggccgtcaacgccgccagcgccagcccactgctgggctttaccagcatcgccgccgccaccagtgacgccatcaccttgccgccaggctacagcgcctcggtgctgatcagttggggccaaccgctgagcaagaacgcacccgccttcgacccgtccggcaacggcacggccaaggcccaggagcagcagttcggtgacaacaacgacggcatgagcctgttcgccttcccgggcgacgacaaccgtgcgctgatggcgatcaacaacgaatacaccaattaccgctacctcttcgcccacggcggcgcgccgcaatcggccgaagacgtgcgcaaggcccaggccagcgaaggcgtgtcggtgatcgaagtgcggcgcaagggcgacacctggcagttcgtgcaggactcgcgctacaaccggcgcatccacggcaactcgccgatcaatctcagcggccccgccgccggccacgcctggctgaaaaccagcgccgacaaaaccggcaagaaggccctcggcactttccagaactgcgccaacggcaagacaccgtggggcacctatctgacgtgcgaagagaacttcaccgactgttttggcagcagcaacccacaacaaaccttcgacgccgggcagaaacgctacggggtggtagccgccagcaaagacatcaactggcacccgcacgacccgcgcttcgacatcgccaagaaccccaacgagctcaaccgccacggttgggtggtggaaatcgacccgttcgaccccaagtccacccccgtcaaacgcaccgccctgggccgcttcaagcatgaaaacgccgccctggctgaaacccgtgacggccgcgctgtggtgtacatgggcgacgacgaacgcggcgagttcatctacaagttcgtcagccgcgacccgatcaaccaccacaaccccaaggccaacaaggacctgctcgaccacggcactttgtacgtggcgatcttcgatgcgggcgacagcaacgccgatcaccccaagggcaagggccaatgggtcgagctcagccacggcaagaacggcatcgacgccagcagcggcttcgccagccaggccgaagtgctgatccacgcgcgcctggccgccagtgtggtgaaagccacgcgcatggaccgcccggaatggatcgtggtcagccccaccgatggccaggtctattgcaccctcaccaacaatgccaagcgcggtgaagacggccagccggtgggcggccccaacccgcgtgagaaaaacgtctacggccagatcctgcgctggaaggccgacgcggataaccacggttccacggaattcagctgggacctgtttgtggtggccggcaacccgggcgtgcacgctggcacgccaaagggtggctcgtcgaacatcaacccgcagaacatgttcaacagccccgatggattgggtttcgacaaggccgggcgcttgtggattctcaccgatggcgactacagcaacgcgggtgacttcgcgggcatgggcaataaccagatgctctgcgccgacccgtccaccggggaaattcgccgtttcatggttgggccggtggcctgtgaggtgacaggcatcagcttctcgccggatcagaagacgttgtttgtggggatccaacacccaggcgaaaccggcggatcgacctggccggagcatctgccgaatggcaagccgcggtcgtcggtgatggcgattcggcgggatgacggcggtatcgtcggcgcctgacaaagcctcatcgggggcaagccccctcccacattgattgcattcacatattttgacttgtgaacacagtcagtgtgggagggggcttgcccccgatagcaatggcacagtcaccacctatctcagccccggtgcgttaccatacccggccggacgcggcgccctgctgcgcgcaggagttcgcatggcccacccgtttgaaacactcacccccgacctggtcctcgacgctgtcgaaagcatcggtttcctcagcgatgcgcgcgtattggcgctcaacagctacgaaaaccgcgtctaccaagtgggcatcgaagactccgagccgctgatcgccaagttctatcgcccgcagcgctggaccaacgaggcgatccttgaagaacaccgcttcaccttcgaactggccgaatgcgaagtgccggtggtggcaccgctgatccacaacggcgaaagcctgttcgaacatgccggcttccgcttcaccctgttcccgcgccgtggcggccgtgcgccggaaccgggcaacctcgaccaactctatcgcctcgggcaactgctcggccgtttgcatgcggtgggctcgacccgcccgttcgaacaccgtgaagccctgggcgtgaagaacttcggacacgactccctcaccaccttgctggaaggcaatttcatccccaaaagcctgctgccggcctacgagtccgtggcccgcgacctgctcaagcgcgtggaagaggtgtacaaggccacgccgcacaagaacatccgcatgcacggcgattgccaccccggcaacatgatgtgccgcgacgagatgttccacatcgtcgacctggatgactgccgcatgggcccggcggttcaggacctgtggatgatgctcgccggcgaccgtcaggaatgcctggggcaactgtcggagttgatggacggctatcaggagttccacgacttcgacccgcgtgaactggcgctgatcgaacccctgcgcgccttgcgcctgatgcattacagcgcctggctggcacggcgctgggatgacccggcgttcccccatagtttcccgtggtttggcagtgagcggtattggggcgatcaggtgttggccttgcgcgaacagctctcggcgttgaatgaagagccactgaagctgttttgactgacaaatatccttacaatcgcgctttgttagctgcctaagcaaggatttcgcaatgcaagccgccaacccccgcaaggggtacatcctgggcctgagcgcctatgtcatctggggtctgttcccgctctacttcaaagccatcgccagcgtgcccgccgccgaaatcatcgtgcaccgcgtgctgtggtcggcgctgttcggcggtttgctgttgatggtctggaaacatcccggctggttccgcgaattgcgtgacaaccccaagcgcctggcgatcctggcccttagcggctcgttgatcgcgggtaactggctgacctacgtgtggtcggtgaacaccgggcgcatgctggaagcgagcctgggttactacatcaacccgttggtgaatgtggtgctgggcatgttgatcctgggtgaacgcctgcgccgtttgcagtgggtcgccgtcgggctggctgcggtgggtgtggcgcagcaggtgtggcaggtgggcagcttgccgtgggtgtcgctggtactggcgttgacctttggtttctacgggctgatccgcaagcaggcaccggtgaaggcgctgccagggctggtggtggaaacttggatgctggtgccgattgcggttgcatggctgctgttcaatccgaccgcccacagtgcgcagatggaattctggggcacctccgaagcctggtggctggtagccgccggcccggtgacactgatcccgctggtgtgtttcaacgccgccgcacggcatttgccctataccgccctgggctttttgcagtacgtcgcgccgaccctggtattgctggaagccgtgctgctgttcggcgagcatctggcaccaagcaccttgaccgccttcgcgttcatctgggcgggcctggtggtgtacagcgtggatatctggctcagcgcacgcaaacgttgatcaaataacgtacaaacctctgcaagccataatctacgtggcttgcagacatccaccccaaggttatccacaacctgatccccgccatttgtgcacaagcccttgaaactgctcgttttttgctcaagtagcgaagaaccccgcacggcgtggcctggcgccgggtctctacaggttatccacaggcccatgcaagatttccatgcataaccctgtgggcagattattcctcgtggtgcagctccaccatcagatcatcggccagggtttccagggacaattgcaaagtatccagggataacgctgccggcacctgcaacagcgcttcagcggtgaacagcgggtcaccgctcatgggcgccgggcgcacgtccgtgctcaggctctccaggttcacgccctgcttgctcagcagcgccgtgatctcgcgcacaatgcccgcacggtcattgcccaccagcgtcatcatgatcgacttggaggccgaggcctgcccgctgctgccctcacccaccagcacgcgaatgccgtgtgtggataagtcctccagcgcaccgaccagcgcctgacggttctccgtaggaacgccgacgcgcaggatcccggcaaattgcccggccatgtgcgccatgcggctttccagccagttgccaccgtgggcggcgatgttctgtgcgatgcgctcgaccagaccgggtttgtcggcggcgataattgtgagtacaagatggtccatggcaaagccctctgaattcaatctacaaggtggactcggaagccctcgaaaacaaatcgtgtaccatttttatatttatctggaacaatccaatagttttttgagaacatctggttctccgctgtgaccgtacgaccaaagtgggtcgctaaacgacgtatttagtctaattttcacaaccgcaagtcatcatgtagtatgcccaaccgtgcactacataatgaaaatctgaaaaagcgcataagctccgcagagtgaggcaagcaatgactgaacacgttcaagtcggtggcctgcaggtcgccaaagtcctgttcgacttcgtgaacaacgaagccattcccggtaccggcatcactgccgaccagttctgggccggtgccgacaaggtcatccacgacctggcaccgaagaacaaagccctactcgccaaacgcgacgatttccaagcgcggatcgatacctggcaccagactcacgcaggccaggcgcacgacccggtggcttacaaagccttcctgcaagacattggatacctgctgccagaagccgcggatttccaggccacgacccaaaacgtcgatgacgagatcgcccgcatggccggcccgcagctggtggtgccggtgatgaacgcgcgcttcgccctcaacgcctcgaatgcgcgttggggctcgctgtatgacgcgctgtatggcaccgacgccatcagcgaagccgacggcgccgagaagggccagggctacaacaaggtccgtggcgacaaggtgatcgccttcgcccgcgccttcctcgatgaggccgccccgcttagcgctggcagccatgtggagtcgaccggctacaagatcgttgatggcacgctgatcgtcagcctcaagggcggcagcaacagcggcctgcgcgacgatgcccagttgatcggctaccagggccctgcggccgagccgattgcgatcctgctgaaacacaacggcctgcacttcgaaatccagatcgacgccagcaccccggtcggccagaccgacgccgccggcgtcaaagacgtgctggtggaagccgcgctgaccaccatcatggactgcgaagactccgtcgctgccgtggatgccgacgacaaagtggtgatctaccgcaattggctcggcctgatgaagggcgacctggccgaagaagtggccaagggcggcaagaccttcacccgcaccatgaacgccgaccgcgtgtacaccggcgtaaatggccaggatgtgacgctgcatggccgttcgctgctgttcgtgcgcaacgtgggtcatctgatgaccatcgacgcgatcctcgacaaagacggcaacgaagtgcccgaaggcattctcgacgggctgatcaccagcctggccgcgatccacagcctcaacggcaacagcagccgcaagaacagccgcaccggttccgtgtacatcgtgaaaccgaagatgcacggcccggaagaagccgcgttcaccaacgagctgttcggtcgcatcgaagacgtgctgaagctgccgcgcaataccctgaaagtcgggatcatggacgaggaacgccgcaccacggtcaacctcaaggcctgcatcaaggccgccagcgagcgcgtggtgtttatcaacaccggtttcctcgaccgtaccggcgacgagatccacacctccatggaagccggcgcgatggtgcgcaaggcggcaatgaaggcggaaaaatggatcggcgcgtatgaaaactggaacgtcgatatcggcttgagcaccggcctgcaaggccgtgcgcagatcggtaaaggcatgtgggcgatgcccgacctgatggcggcgatgctcgaacagaaaatcgcccatccactggccggcgccaacaccgcgtgggtaccgtcgcctacggcggctgcgctgcacgtgttgcactaccacaaggtcgacgtattcgcccgccaggccgaattggccaagcgcgaacgcgcgtcggtggacgacatcctgaccattcccctggccagcaacactgattggtctgacgaagagatccgcaacgagctggacaacaacgcccaaggcatcctgggctatgtggtgcgctggatcgaccagggcgtcggctgttcgaaagtgccggacatcaacgatgtgggcctgatggaagaccgcgccaccctgcgtatctccagccagcacatcgccaactggctgcgccacggcatcgtcaacgaagcccaggtgatggaaagcctcaagcgcatggcgccggtggtagaccgtcagaatgccggggacaaactgtatcgcccactggcaccggacttcgacagcaacatcgcgttccaggcagcggtggagttggtgattgaagggaccaagcagccaaacgggtacaccgagccggtgctgcaccgtcggcgtcgggagttcaaggctaaaaacggcctgtaaatgaaaaagccctgatcgagagatcggggctttttctttggggttgtggtggctgaactggcgctatcgggggcaagccccctcccacaactgataggcggcgcagcacacaagtgggagggggcttgcccccgatgaggccgttatagacaccgcagaatcaggacgccatccccaactcgcgcttgaccatcttcgccaacttcacgctatcaatcggcttgagcaagaagtccaccacgctcaaatgcatcgcatcgatcacgtccggcgcttcggcgtcccccgacatgatgatgatcggcagcgctgcccgggtggattcacgcacttgtcggatcagttccaggccattgctgggcgccatgcgcaggtcggtgatcagcaaaccgatggagctgctggacttcaacaaatcccacgccgcctcaccactgtcggcggtcatgcagcgaatgccgtccagccccaggatttccgccagcagttcacgcgcgtccttgtcatcgtcaacaatcaacacgcgttgtggcggtaaatcaggctccagcatcacggcgctcagcgcctcgcgctcggcatcgctcaaaatatcgtggtcggacatacggttctcagcaattctcatctagctcccagcacactcgtcagacatctgcggaagggcgatcaatgtgcacttcgtcggaaagtttgactagtgggtgttctacggggtttggacgatagtcatgtaaggtttttccctagttctatggtgttttcagcgacctagacttacgtccaatgggcacccgctgcgcaggagtcgaccatgagggacgataacgacaaaaaaactgcggtcactgttatgagtaaagctgatgcctacgcccaggcggggaaaactgctgtactgcaaaatatccacggcaccctgcaattcctgcaacgtttcccgccgttcaaccagatggaaaacgcccacctggcgtttttggtggaacagtgccagttacgcttctacagccccggcgacagcatcctcaaaccgtcgggcggcccggtagagcatttttatatcgtcaagcagggccgcgtcgtgggcgagcggccggacagcgccgaaaccacctttgaaatcacgacgggcgaatgcttccccctggcagccctgctcggtgaacgggccacccgcaccgagcacaaggccgccgaagacaccttctgcctgcaactgaacaaaccggcgtttatcaagctgttcgcgctgtccagcccgtttcgcgactttgccctgcgcggcgtcagcagcctgttggaccaggtcaaccagcaagtgcagcaaaaggcggtggaaacccttggcactcaatactccctgaacactcgcctgggtgaattggccatgcgccacccggtaacgtgcagcccaaccacgccgctgcgcgaggccgtcacgctgatgcatgagcagcaggtgggcagcatcgtgatcgtcgatgaacacaaagcgcccctggggattttcaccctgcgtgacctgcgccaggtagtggccgatggcaccagcgatttcagccgggccattgaaggccatatgacccaggcgccgttcttcctgaccccggaccacagcgccttcgacgccgctatcgccatgaccgaacggcatatcgcccatgtgtgtctggtcaaggagcagcgcctgtgcggcgtggtgtccgagcgcgacctgttttccctgcaacgcgtggacctggtgcacctggcgcgcaccatccgcaacgcaccgcgggtagacaacctggtggcgattcgcggtgaaatcggtcaattggtggagcgcatgctggcccatggcgcgtcgtccacccagatcacccacattattaccctgctcaacgaccacaccgtgtgccgggtgatcgaactgaccctggccgaaaaaggcgaccccggtgtgccgttcagctggctgtgcttcggcagcgaaggccgccgcgaacagacgctgtacaccgaccaggacaacggcatcctgttcgatgccaaggacgccgccgaagcggccgagatacgtggtcggctgctgccactggcgcagcaaatcaatcagagcctggcgctctgtgggttcagcctgtgcaagggcaatatcatggccggcaacccggagttgtgcctgtcgcgagccgaatgggcgcggcgttttgcagcgtttatccgcgaggccacgccggagaatctgctgggttccagcatctatttcgacctgcgtgtggtgtggggcgatgaacgtggctgcgagcaactgcgccagggcattctggatcaggtcgcggacaaccggttgttccaacgcatgctggccgagaacgcattgcgccagcgcccgcctgtaggacgtttccgcgagtttgtgctgacccgtaaagggggcgagaaagccaccctcgacctcaaggtgcagggccttacgccgtttgtggacggcgcgcgcctactggccctggccaatggcatccacgccaacaacaccctggagcgcctgcgccaactggtggtcaaggaagtaatcgagcgcctggacggcgccgcctatgaagaggcctaccactttatccagcaaacccgcatgcagcagcaccagttgcagacccgcgagaaccagccgtattccaaccgtgtcgaccccgacagcctcaaccatctggaccggcgcatcctgcgggaatccctgcgccaggcccaacgcctgcaaagcagcctgacgttgcggtatcagctgtgagcttgttcaactggctgcgtacgaaaaagccggggctcgacagctcgcagcaacagcgcctggagcaactgtgcaagccttcgccgctaggcaaccaacctttgcccagccagcgctgggtcgtggtggacctggaaaccagcggcctgaacctcaatcgcgaccaggtgctgtccatcggcgcggtggtgatcgaggacggtgcggtggatttctcccagatgttcgaacgcaccctgcaacgcgccgagaccagactcagccccagcgtgctgatccacggcctcggccccagtgccattgccgccggcagcgacccggtggaggcgctgttggacttcatgggatttgtcggcgacagcccgttgctggcgttccatgcgccgttcgatcaacacatgctgtgccgggcgctcaaggacagcctgggttaccgcctggcccacccgttcctggacgtggccgacatcgcccctttgctgtgccccgacgcgcatatccgcgaggccgggctggacgactggatcaaccatttcaacctgcacgtgggcgaacgccatcatgccagcgccgatgccctggccacggcggagctgatgctcatcctgttcagccgcgcacgggcgcaacacatcgacacgccacaggcgctgcaagagcgcttgagccaatggaaacggcgtcaacacgcgcactctttttaacaccgctggtgggcgggcttactgtggcgagcgggcttgccccgcgttgggctgcgaagcggccccaccaagaacaccacgattggtcagttagaacatcattactggttttggggctgctacgcagcccaacgcggggcaagcccgctcgccacagaaagcccgttcgccacaagagcatccccccttcgaaccgacagacgccaattgcgtacactcgacggctctgacacaatcgcgaataattctcgttagtttaaacatcgcgtttaccaggtgatgccttgtcgtcgatccagaacccacgcagtgagcttgttggtgcgttgtatcgcgaccatcgtggctggctgttggcttggcttcgacgcaacgtggcctgcccaagccgcgccgaagacctgagccaggacaccttcatgcgcctgctcggccgtgatgagttgcgcgccccccgtgaaccccgtgcgtttctggtggcgatcgccaagggcttgttgttcgactacttccgccgcgccgccctggaacagacctacctcaccgaactgatgctgatcccggagagcgaacacccctcgccggaagaacagcaactgatcctcgaagacctcaaggccatcgaccgcctgctcggcaaactgtcgagcaaggcccgcgccgccttcctctataaccgcctcgacggcctgggccacgcggaaatcgcccagcgcctcggggtctcggtgccgcgggtgcgccagtacctggcccagggcattcgccagtgctacatcgcactgtacggcgagccgcagtgacggtgatcagttccaaaccggtctcggcccgcgtgctggatgccgcgattgcctggcagctgtcccttgattcaggtgacggcagcgccattgagcgcgaagagttcgataaatggctggccagcgatgaagagcacgcccgcgcgtggcgccaactgggcatgctcgaccagcggttcagcgtggcctcgggcccggcacgcgtagcgttgttgcaatcgcgcgacagcattcgccaacgcgttcgcaagctgggcagtgggctggcgagcattgcactggtgatcggcctggcgttgtttgccggcgagcgctatgtgccgatccactattggctggccgaccaacgcaccgccacgggtgaacagcgcacgctgaagctggcagacggtacggtgatcaacctcaatacccacagcgccatcgacgtgcgttttgatgaaaagcgccggctgatcgtgttgcaggaaggcgagatcctggtcgagaccggccataacgatgcgcgcccgttctatgtgcaaacccgcgacggcagcctgcgggcgctgggtacgcggtttatcgtcaagcgcgaaaacgacgccacgcgcttgagcgtgctgcaatcggcggtggctgcccagcccgaggcgctgcaccaggagcagattttcaaggaaggccagcaagtgctgatgcgcagcgacggcctcggcccactgctggccgttacccccgccaccgacgcctggacccgcggcatgctggtggtggacaacgcccgcctgggcgatgtgatcgaggaattgagccgctaccgcaccggttacctgggtgtggataaaaacgtggccgatttgcgcatcactggcagcttcccattgcgcgacaccacgctggcgcttaatgcgctgctgccgaccctgccggtgcagatcgagcagcacacgccgtggtgggtgacggttaagggcaagccttagttttagcggtgccttggctatcgctttcgcaggcaagccagctcccacacttgaccgcgttctacctgaaaaaacacggtcgaatgtgggagccgggcttgcccgcgaagaggcccgcaagcacaccttacgccccggggaaaaatattttcagcctgctctatcactttctgattctcgttcggcacataggcaattgcgaattacttccattcaggagccgccctatgtcccgcacgctagacaccttgttgcgccccagcctgttagccgtggccattgctctcagcgccccgctggtcagccctttgctgatcgccgccgagcaggcgtccagcgtgcgcgcctacaacttgccggcggcgccactggcgaccaccctcaaccagatcgccagccagggcggcctggcactgaccctcagcccggcgctggcatcgggcaagacctcggcgccggtccagggccagttcgacgcacccggtgcgctgcgtgaggcgttgcgtgggacgggcctgcagttggagcaaagcagtgcgggcacttacaccctggtgccggttccggaaggcgtcgtagcgttgccgaccaccaatatcaccggccaggacagctatgaaagcgcctggggcccggtcgacggttacctggccaagcgcaccgccgccggcaccaagactgacaccgcgttggtcgaggcgccgcgctcgatctcggttgcaacgcgccagcagatgcaggaccgcaacgtgcagaacctggatgacgcggttaaatacatgcccggcatcgtctccgccagctacggcagcgacacccgctacgactggatgcgtgtgcgcggcttcgaaccgacccagttcctcgacggcctgccgctgccacgcggtgtgtacgccaacccgaaagccgaaacctggaacctcgaccgcctcgccctgctgcgcggcccggcctcgtcgatctacggccagaccccaccgggcggcctgctggacatggtcagccgccgccccagtgccgagtcgagcaatgccgtacaggtgcaatacggcagcgacaactaccgccagatcaacttcgccagcaccggcaagatcgatgacgaaggccggttcctctatggcctcagcggcgtggtacgggatgccggcacccaggtcgatcatatcgacaacaagcgctacaaccttgcgccgagcctgacctggaacatcgacccggacaccaagctgaccttcctttcgcagttcacccgcgacgatacgggcaccaccagccagttcatgccgatccagggcaccaagatcaaatcgccgctgggcgaggtgtcccaccacaagaacctgggcgacccggactacgagttctacgaccgtacctactacgcgctgggctatgcgttcgagcatcgcttcaacgacatctggcagttcaagcagaacctgcgctacaccaagtccgagctggacttccaacagctgaccgtgggttcttatgccttctccccagcggatgcggcgggcaatatcagccggtcgaccaccaacgtgaatgaaagcatcggccagttcgcgctggacaacaacttccaggcggacttcgccaccggcgacatcacccacaccttgctgctcggcctggatcaccagcgcaccgataccacctatcgcgcgatctacggtacagcgtcgaatatcaacatcttcaacccggtcaatacccaaccgactgtgcgccctaccggcgtccgccctttttacgactacaaccagaagaccgtgcaaaccggcctctacgcgcaggaccagatggccctggaccaatggcgcctggccgtgggtgggcgtgaggactgggtgcatcagggcaccacctatttcaacgataacgatgcgaccaacaccgaccgcatcaagcacttcagtggcaacgcggcgctgagctatgtgttcgattcgggcttcgtgccgtacttgtcctacgccgaatccttccaaccggcgagcaacgccgacaccaatgccaccaagaccttcaagccgaccgaaggcaagcagtgggaaatgggcgtcaagtaccagccgcccggctccaacacgctgctgagtgcggcggtctacgacctgacccagaagaatgtgcaggtgaccaccctcggcgccggcggccagcaaatcaacagccagaccggcgaagtgaaggtcaagggcctggagctggaagccgtgtctgatgtgaccgagaacctcaaggtcatcgccgcctacaccctggcgaaatccgaggtgcaaaaaggcatctacaaaggcaaccgcctgaccttgatgccgaaccagcaagcctccctgtggaccgactacacctggcacaccggcctgctcgacggcttcggcatcggctttggcgcccgctacaccggcaacacctacggcgaccaggccaacacctggctgggcaaggccaacgcctacaccgtattcgacggcgcggtgcactacgacctcggccgcctggacaacagcctcaagggcgcatcggtcaagttgaacgccaccaacctgttcaacaaggactacctgtccacctgtgacggcaactactgctacttcggcgaccaacgcagcgtcgtcgccagcgccacctaccagtggtaatcagctgagttaaccgccgggccgcccaaggggcggctttggtgtgtctgaaggttgaaaacatgaaaagccaaaccatccgccgctggtccttcatccacacctggaccagcctgatctgcacggtattcctgctgctgctcgccctcaccggcctgccgctggtgtttcaccacgagatcgaccacctgctgggcaacgagccggaactggcgcagatgcccgccgatacgccgcagctcaacctcgagcagcttgtagccaaagcgcaggcccatcgccccggcgacgccatgcagtacctggcctgggacgaagacgacaagaacggtgtgatcgcaatcatggccgccaccgccggcaccgaacccaactcgtcgcacaccttcatgctcgacgcgcgcaccggcgaagccatggaaaccccggcggccaacggcggattcacgctgttcctgctgcgcttgcatgtggatatgttcgctggcctgccgggcaagttgctgctggcgttcatgggggttctgtttgtgctggcgatcatctccggcacggtgctgtacctgccgtttatgcgccgcctgaaattcgccactgtgcgtcaggacaaatccacccgcctgcgctggctcgacctgcacaacctgatcggcgtggtcaccctgacctgggcgctggtggtgggcgtgaccggggtaatcagcgcctgcgccgacctgatcatcgccgcctggcgccaggacagcctcagcgccatgatcgaaccctacaaaaacgccccacccctgacccaacgcgcaccggccaccgagctgttggcgattgccgccaaggccgcacccggcatggcgccggacttcatcgccttccccggcacacgcttttccagcgagcaccattacgcggtgttcatgaaaggtagcacccacctcacctcgcatttgctcacgccggtactgatcgacgccagcaccctggccgtcaccgccatcgccgaacgcccgtggtacatggacgccatgggcatgtcccaaccgctgcattttggcgattacggcggcatgccgatgaagatcctgtgggcggcgctggatgtgctgaccatcatcgtgctggtgagcgggatttacctgtggatcgtaaggcgccgagcatgaagccacgtcagtcgagtttctggaaggtctttgggattccgctggggatcggcctgctcagcgccgccgggttgtttgcagcgctgctcggcgatgggctgtgggattcgctcagttggctcgggttgggcattcccgctgcaattggcacttgggccttgctcaaacggtgagatagattagcgctgcccaatcagaggaatgcccatgtccgctcccagcatgaccttgttccacaaccccgcttcaccgtttgttcgtaaggttcgcgtgctgctggctgaaaccggccagcaggaccgcgtcgccctgcacggctgcatgccgaccccggtcaacccggatgcgcaggtggtgcaaggcaaccccgtgggcaagatcccggccctgcgcctggccgatggcacggtgctgcacgacagccgggtaatcctcgattacttcgaccaccaacacgtcggcaacccgctgatcccccgcgacggctcggcccgctggcgccgcctgaccctggcctcgatggccgacggcatcatggatgccgccgtgctggtgcgctacgaaaccgccctgcgcccggcagaaaaacactgggaccaatggctcgacgaacagcgcaacaagatccgtcgcaccctcgccgagctggaagccgacgcgattgccgagttggccagccatttcgatatcgccgccatcagcgtggcttgcgccctgggttacctcgacttccgccacccggatatgcaatggcgcctggacaacccgcagcttgccgcttggtacgcggaggtcagccagcgcccttcgatgctggaaacccagccaccgctttgacagtcactgtagtccggtgtgggagggggcttgcccccgatggcggtgggtcagctacaggtgaagtaacagacacactgcaatcgggggcaagccccctcccacactggccggtggcaaggttgagatagtcgatgatcctcgccttcatttgctgatcttcccgcaacccgatcattgcaccgcctccaggtcaaacatcaacggctcggccgccttgcgtttgcccacgccataccagtccaactttcgcgtcagtaccatcaccgtgcccagcaggccgaacagcagcaacgagcccatcagcaacgcgtagtcctcggcactcaacaacccgtacagcaagccatacaacgccgccagccccgccgaaaagcccaggccatgggcgacgctgcgcagcacgtggcacacatagaagccgatcaacaacacgcacgcactggccgagatcaggtaggccagggcgaagcctatgtgctcggacaacgacagcaacagcaggtagaagaacgccagcgcaaagcccaccaacgcgtactgcaccgggtgcaccgccaggctcttgagcacttcgaacaggaagaaaccggcaaaagtaagggcgataaacagcagcgcgtatttgatcgcacggtcgctcttgaggtactggtccaccgggtcgatgaagttcacaccgaagctgcggttgttgaagtcattgcagccctggccgtccaggcaggtttgcagggcctgttcgaggttggtggagaaaaatgaggtctgccagttggcggtaaaccccttgtcggtgacctcacgctgcaccggcaggaagttgccgataaagctggggtgcggccagttggaggcgagtgacacctggctggtcttgcccaccggcaccacttgcaattgttcggtgccttgcaggcgcaggtcgaaggcaaagtccacgacagagggctttttgctgtcctgctccggcagcgccacgtgcacgccttcacccagccagtccacctgggagcccggttcgaactccagctgctggctgcccagctccaacttcaacgcattctcgatgccgcgaatatcgctgatgcccaccgccagaaacgccggatcaaagcggtaatcggcaaagtcctcggtgatgcccagctgcgcaggcaattcgaagcgcccgctgatgcggttgtcggcatggaacagccgcgcctggtagatgccgcgtgaacgcagttcggtctgcaccttgccgtcgagttcaaaacggtccggcaggaaatacagacgaccacgctcttcacgggtgacttcgtagcgtttgttgagcttttcattgagcttccactcgcggacggtcttgcgatacggcaccaccatcaccgggccggtgaggcgctgggcgtagctggagctgcgggcgatgtccatcaggacgccgtcgcgcagttgctggcggtcgctgatgatgccgttgatcatcagcaacggaatcagcaacagcaggatcagcagcgcaatcgcgccaagtttgaaaagcaggctgcggttcatgggtctctccctgttttgatgggggagagtctgggcagcctgtgtgggagatttatgtgggcaatgtggagactgtatggagatgcagcaccacttgcacgccaccttgcacattaccgatctgcaacgcgccgccgtgcagcttcatcacttcctcgacaaagttgaggcccaggccggtgcttttgcgcccgctggccgggcgtggcagcgaatagaaccgttcgctcaggcgcggcagggcgtagtcgggaatcggcgcggcctggttgaacaggctcacctgcacgtcgttgtgccgggtctgcgcgctgaatttcaaggtgccgccaggcggtgtgaaatccagggcgttatccagcaggttgcccagggcctggcgcagcaggaagggttcgccgtacaccttcacatccgccgcaatcgtctgttcaacgtgcaatccggaaccttcgatccgcgcacattgcgccttgagcacatcatcgaccatggctgccagcaggatgctcacctgctcttccaggccctggcgttgctcgacctgcgccaggttcagcagacgttcgatcaactgctgcaggcgcgcactttcactgtcgatattgccgacgaagcgctgctgttgctcacgggtcatatcgccctgcaacagctctgccgcaccgcgtatcgcggccagcgggctcttcaattcgtgggtcagggtgtgcacgtagtgttcgacgtaggccttgccttccagttgcgtgcgcatgtgttcgacggcggtggacagctgtttgagttcgccgccacggtaatgcggcaactcggcgcgccggccctcgctgaccgcctcggcgtaggccgtcaagcgacgcagcgcaacgctcagccaccacgacagcagcgcgccgagcaacaggccgagaaccaccaggcccgcgccgtaccacagcaggcgccgctcggtgcggtcgacgtagggctgcaacgagctgttcggcttggccacggtgaccacgccgatgatctggccgttgtcacggatcggtgcgcccacgtgcatcaccgaggaagtggggtcatccagctcgctgcgtgtggagcgggcaccgtactcgccgcgcagggtcaggtacacatcgttccacttggaataatcctgccccaccgcttcgcccgtggagtcgagcagcacggtgcccttggcatcagtcacgtagatgcggtgattgacctggttcttcggcagcccccagatggtcgcgcccggctggcgattgccgtaggccttgagcagttcaggccagtggctttggccgagggtgccgttcttcacatcgtcgcgcaggatttcggccagcaggttggcggtgtccaccagggtttcttcggtggactggcgcacgccggggcgaatttccttcatcacggtgctgagcacgaagtagccggtcaggccgataaacagcgcgtacaccaggaaaatccgcagccccaggcgcatcagctgttgcctgggctgtagctgtagccaagaccgcgatgggtctggatcggctcggcgtcggcagccacattgcgtaacttgctgcgcaggcttttgatatggctgtcgatattgcgctcgtaaccggcatccgccgcgacgccgaccgcgtccaacagctgctcgcggctgaatacgcgctcgggttgttccaacaggctttgcaataggcggaattcgtgacgtgtgaggctcaacggctgaccgcgatacatgatctgcatgcgctccaggtctacctggaataccgccggcgcagcccctggaccaatccgcttgaggatcgccctgacccgcgccgtcacttcccgtgggctgaacggcttgaccacataatcgtcggcgccgatttccagccccaccacccggtcgatctcgccatcccgcgcgctgaggaacatcaccggcacttcgctgaaccggcgcagttgcttgcaggtttcaaacccggtgatgtccggcaggccaatgtcgaggatgatcagatcggccggcgtctggcgttgatgctccagcgcagcctggccgagtgtcagccaggtggtggtgaagccctcgccttgcagggcgaatatcagcgtgtcggctatcgccgcttcgtcttcgacaatcaggatgtggggcatggtggtccgtcagcagtccggtttgtcagcagtgtaacgacgcgccgggttgaccgcagcgccgaactcgcgcagagccttggcgccgatcagcagcgggtagttgaagctgctgcggtcggtgaggttgacctcgacggtgcgcttgacgtcgcccaggcacatttccaggtcgatcaccgggcgcttggccacggtggcttcgtccttgtcctcgtcctcgtcggcgcggctcttgatcttgctgatgcgcaagactttgtgttcgtagaccttattggacgcgtccttgccgccgaggcggaaacgcacccaatcgtcaccgtcacgggtgaaggtttggatgtcacgggccgacagcgaggcggtgagcgcgccggtgtccatcttggccttgaaggtttcgccgatctccggcagctggatgtattcgtagcgaccgtagagggtcggttcggcggccatgaccggcagggcagccagggccaaagaggcaaggagcagtttcacgaagtgatttcctcggaaagaagtaggcggattctagaccgcaaaagcgccggttagttagctcatcccaccatacccggcacattgtgaaacattcgtacggtgatttgcgatttggcctctagactcaccttgcttatgatggcccgcccacaagattccaagagttacttatgcgccgcctgctcaccggctgtctcgtcaccctgctgctcttgctcaacaccctcgtgctgttcggcccgttgatggtgtttgccctgctcaagctggtagccccggggcgcttgcgtgactacatgtcatgggcggtaatgtggatcgccgagacctgggccgagatcgacaagctgattttctcgctgtgcatcccgacccagtgggacattcgcggcggcggcgatctgcggggtgacaccagttacctggtgatcagcaaccaccagtcctgggtggatatcccggccttgatccaggccctcaaccgccgtacgccgttcttcaaattcttcctgaaaaaagagctgatctgggtgcccttcctgggcctggcctggtgggcgctggattacccgttcatgaagcgctacaccaaggcgttcctggccaagcatcccgaactggcggggcaggatttgaagatcaccaaagaggcctgcgagctgttcaagcgccagccagtgacggtggtcaattatctggaaggcacgcggttcagcgacgccaagcgcaggcagcagggttcacccttcaaccgcttgctcaagcccaaggcgggcggcgtggcgtttgtgctggcggcgatgggcgagcaactggatgcggtgctggacgtgacggtggtgtatccgcagcaaaagattccggggttctgggctttgatcagcggttcggtaccgaaggtgatcattgatatccgcacccgcgaactggacccggcgctatggcaaggggactacgagaacgatccggcatttcgccagactgtccagagctgggtgaaccagctctggcaggagaaggatcagcgcattcagctattgctcaagtaatacggcatggcgtcgttcaggtgccccaccatcccgataaaatgctttggcgccttcgagcgcagctttgagactggcaatcaagtcagcatcagaggtgtttaccgcgccatcgagcttcaggaacgctttcgctaccgcagccaggcgttcaagatcggccggctcaaggcctttttcggaagcttcggctttgaggaaatccctcatgctggaaagcatctcgtctccgcccaaggagttggtagtgctatcagccaccgctttcttgtaagcggcaacgaatttctccgactcctcgttcgtcggcgcttttatgcccgcgaacaatgcattggcacccagcggaaaattcgatttttgctcagattgagtgtgttccacaaaacgtcgaagatccgaaagcagttgcttgagttgcaagtccggcttcttgctgctccctgccacctcccaggcattgcgtatatcctggatcaacccggacggcagggtgaggccttgccgggccacacgaaccgctgcctgggcctgctcgaaagaaataccggaagacattgggaactgtgaattaatctgagtcattggagcaccatttcggtcagttgaagagtctctcaaataccgctcttagcgattgatgagagagttcttattaggtggccactcaacctcccacagttcccagcgctatatcacaggatattacgcagtcagtcgtccttccaacacagacgaagacgataccaatagaggaatacacgagcacagtgaccgcgcatcctcgtaagcccccccgcactggatgagcccgccacggagaggcaaaaaggcatgctgaacatccgtcagttgccagtgccccaggccgaggccaatttacccagcaatgactggttcgcaccctggccacccaagtattgcaggatcaccggcgcaaactggccgaccatgccactgtccatgcccagggcgctgaacgcagtgttcaggtcgttggtgttcttcacattgcccagcaggccgtcgaggccgctggtcttgctaccgccagcctggccgagcatcccgctcaaggccccgaggctgcccaacgcattattgcccgacagttggtcgaggcccggcacactattgcccagttgcgaatagtcgttgccgctcaatttgttcttggccaggcccagcatggcgcccgtaccgccgaccgcttgctcgggggtgatgttcagttgcgaggtcagggcgctcaacaggccggccgtctcggacgacggtgcagcagcggctgccttgttgttaccaccctgcatgccggaaatggcattggccgcgtcgccaaggctgaaccctgcggcgagcaccgggccggctgccagggtcatcaggcaggaaagggcgaaaccgcgtgaaatcttcatcgaaacaacctctgggtgtaggagctaaaagcaggcgtttgactgacagtccggaacgattgttcccacaccaaggttagttcagatttttctgcatccgaatcgcctcggcccgcgtatagcctgcatacgccactcggagttggatggaatgaatgcccaggctgaactaccctccgcttaccgcgtgcagtcccgtcaccctcgaacgagggtctggagaagctctattagcgccgatgatgctgacccattgcgccctttgctggcgcaatgtgccttaggtaaccgccaggcattcgaaaccctctaccgcagcgtttcgccgcgcctgcacggtgtagccctgcgtttcatgggccgccgggacctggccgaagaggtgttgcaggaagccttcgtgcgtatctggtacaacgcctcccgctacgaggcgcacctgtctgcgccgatgacctggatggtgaatatcacccgcaacctggccatcgatcaattgcgcaagcaccgtgaacagccgctggcagagggtcagcaagacgccttgctcgatgacgcccccagtgctcacgaccaactcgacaacgaacgccaagcccgcgccttgaaccgttgcctggacaccctcgacggcatgcaacgccagtcgatcagcgtggcttacttccagggcctgtcgtgctcggaattggccgaacacttggccgcgcccctgggctcggtcaaatcctggattcgtcgcggcatggaacgcctgcgcaggtgccttgaatcatgaactaccagaccaccgccctgcgccgcgccctcgccgccgactacgccgtcgggctgatgcccgccaccgcgcgccggcgttttgatgcgctgcttctggaggatgccgcactgcgcgtggaactcggccattggcaggacgcgctcgccagcctgaccggtgccttgcccgagcgagcggtgccggcgcatgtctgggaaggcatcaaggcacgcatagagccgcaggtgctgcatgtgccggcgaaaaaaccgttctggatgaacctgcgcctgcaggcggcggcgtttggcatcgtcattgccgtgctggtgggcgtgctctaccagcgcgacctgggaatggaatacaacgccacgctggtcgccgccaaccagcaaccggcgctgcagatcaaggcgtttgccgaccacctacaagtcgagccgctgacattggccgctcttgagccggcacgcgccctggaactgtgggccattcctgccgggggcaagccgatatcactgggcctggtgccagtggcgggcaaaggtcgaatcgcgttgaacaaaacgcagcaggcgctgctgaaaacaccgctgaccctcgccgtcagcctggagccacaagggggctcgccgacaggtcaaccgaccgggccggtgttgtatcagggtcaattggcatcactttgaggtgagatggcgccaggaacccggcgcgcagactgttagatctgtgggagggcttgcccctcccacatctggaacgcggtatcccggggatttaagccgcgctgaagagtttgtgcggatcaatcacaaacttcttcggcacacccgcatcgaactcgccatacccacgcggcgcatcatccaggctgatcacctgcacacccacgatttcggcaatgttgatacggtcccacatgatcgcctgcatcagctggcggttgtacttcatcaccggcgtttgcccggtgtggaagctgtgggattttgcccaacccaggccaaagcgaatgctcaggctgcccatttttgcggcggcgtccacggcacccggatcttcggtgacgtacaggccagggataccgatcttgcccgccacgcgcactacgcccatcagcgagttgagtacggtggccggcgcttccgccttgaccccttcatgaccatggccacgggcttcaaagcccacggcatcgacggcgcagtccacttccggctcgcccagcagtgcggcgatctgttcgtgcagcggggtgtccttggacaggtcggcaatctcgaagccctgggccttggcgtgggccaggcggaccgggttgacgtcgccgataatcaccacggcagcgcccagcaagcgggcggaagcggcagccgccaggcccacaggaccggcaccggcgatgtagaccgtactgcctgggccaacgccggcagtgacggcgccgtggtagccggtcgggagaatgtcggagaggcaggtcaggtcgcggattttttccatggccttgtcgcgatccggcagtttgagcaggttgaagtcggcgtacggcaccagtacgtattcggcctggccgccggtccagtcacccatgtcgacatagccgtaggcgccaccggcacgggccgggttgacggtcaggcacacgccagtgtgttgctctttgcatgagcggcagcggccgcaggctacgttgaacggtacggaaaccaggtcgccgattttcaggttctcgacgtcgctgcccttctcgatcacttcaccggtaatttcatgaccgagcaccaggccggtctgggcagtggtacggccacgcaccatgtgttggtcggagccgcagatgttggtggagaccacgcgcaggatgacgccgtgctcgatcttcctgccacgggggtcctgcattttgggatagtcgattttctgtacttcgaccttgccgttgccgagatacacgacaccacgattaccagacatgctttcacctcgctgttgtttttatggaactgcgttgcccgttgggtgggcagcgcgtttaagtgctcgggtacagatgctgttcttgcgttgtttgtgagggcctcatcgggggcaagccccctcccacattcgaccgcattccaaaggtgggagggggcttgcccccgatagcgtcagtcagagcaccaccgtccgattggcgttcaaaaacacccgccgctcaatgtgataccccaccgcccgggccaacgtcagcccttcgatatcccgccccttggcaatcaagtcctcgggatagtggctgtgatccaccacctccacgccctgggcgatgatcgggccttcgtccaggtcgttgttgatgtaatgcgccgtggcgcctaccagcttcacgcccttgttgtacgcctggtgatacggcttggcgcccttgaaccccggcaacaacgagtggtgaatattgatggccttgccatccagcttgcggcacagctccggcgacagcacttgcatgtagcgcgcaagaatcaccaattcggcgccggtgtcttccaccacttgccacacctgacgctcctgggacggtttatcgttggggtcgagggggaaatggtagtagggaatctggtgccagtcggccaacggtttcagatcggggtgattggacaccaccgcgaccacgtccatcggcagctggccgatgcgctggcggtacagcaggtcgttgaggcagtgatcggccttggagaccatgatcaccacttttggccggtagttcggcgccgtcagctcgaagatcatgccgaaggcttcaccccgcgtggccaggccatcgcggaacgcctgctcgtcaaaaccgtcgggctggcggaattccacgcggataaagaaccggcccgaaagccgatcatcgaacgagtgatgctcagtgacgtagcaaccctgttcgaacaggtagcgggtgaccgcgtccaccgtgccgagcacgctggggcagtcggcggtcaaaatccatgtatcaggtgcgcggctcatggggtattcctcaggcttggacgctcaggccgaattcggcggatgcatcctgcagccacaaccaccagtaatccgagaagctgcgacgaatcaccagctcccaagtgtcttcagccgtgtggcggatcaccagttgcgacttggcgaacaccgtgcccaccgccttgcccaccgggaagttgttggggtgcacgtcgtagctggtggacttcatcagcacatcgcgcacgttcgggccgctgagttcgaggatctgctggccgccgctgacattgacgacctggatatgcaggtcgcccagggcggcgcgcaggttttgctcggcggcgaattcttcaccgctcggcacgatcagcaaccactcatccgggccgagccattgcaggctggtttcgcccttgacgatcacttgcagggctcccggcaactcgatgccgacagctttgtgcacgccggcggcgaaggctgcgtcatggccgtcgccacgaatagtcaggtggcccaggagtttcttttcacgcacggtcacaccggcgttcttgcggcccttgccgaccaggctggcgaggtcggcatggtgcagcgacgactcggccttggcgccggaggtggggcgttgttggtaaacattggctgctgtcataaagcacctgttctaaatgctgtggtgtctgttctggcctcatcgggggcaagccccctcccacaggggaatgcatttcaacatgtgggagggggcttgcccccgatacaggcgactcgatccatcagatgttctggcgatcgcctttcgggtcgaagaacaccgaagaaacaatctccgcctcgatcacgctgccatcggcctgcggtgagaacacccgctcgccgatgcgcttcaagccgcccttcaccaccgccatcgcgaacgaatagccgagggagttgtgggcatagcttgaggtgacgtgaccgaccatcttcatcgggatcgactgcttcggatcaaacaccagttgcgcgccttccggcagccacaccttcggatcgaccggcttcaagcccaccagttgcttacgctcttcacgcacgcagtcttcacggttcatgccgcgccagccgatccacgagaacggtttggtgcggcccacacaccagcccatgttcaggtcgtccggggtcatcgagccgtcggtgtcctggccgacaatgatgaagcccttctcggcccgcagcacgtgcatggtctcggtgccgtacggcgtcaggttgtacttcttgccggcgtcgacaattttttccagcacgcccatggcgtagtcggcctgcacgttgatttcgtacgacagctcaccggtaaacgaaatgcggaacacccgcgccggtacgccgcccaccaggccttccttccaggtcatgaacggaaaaccgtccttgtccaggtcgatgtcggtgacttcggccagcagcttgcggctgttggggccagacagcgtcatggtcgcccagtggtcggtgaccgaggtgaagtacaccttgaggtctggccattcggtctgttggtagatttccagccactgcagcacgcgtgccgcgccgccagtggtggtggtcatcaggaagtggttgtcggccaggcaggcagtcacgccgtcgtcgaagaccatgccgtcttccttgcacatcaggccgtagcgcgccttgcccacgtcgagcttggtccaggcgttggtgtagatgcggttgaggaactcccgcgcgtcggggccctggatgtcgatcttgccgagggtggacgcgtccagcaggccgacgctgtcgcgtacggccaggcattcgcgcttgactgcggcgtgcaggtcttcaccgttgcgtgggaagtaccacgggcgtttccactggccgacatcttcaaactcggcgccgttcttcacgtgccaggcgtgcagcgcggtgtagcgcaccggctcgaagatgtgcccacagtgacggcccgctaccgcgccaaaggtgaccggcgtgtagttgggacggaacatggtggtgcccatctgcgggatggtcacgttcagcgaacgggcggcaatggccaggccgttgacgttgcccagcttgccctggtcggtaccgaagcccagcgcggtgtagcgcttgacgtgctcgaccgactcgaaaccttcgcgggtcgccagttcgatggcggcggcggtcacgtcgttctgcaggtcgacgaattgcttcggcgctcgtgctgtgggcttgtcgtgtggcacttggtaaatagccaaagtcggctcttccaggcggctcaaggcttttggcaaggtaccttccacgggcgcgaaaccggcttcgctggcagcgcgcacgccgccttcaaaaccatccgccagggagtcgccaaggccgtagacgccgttgatgccaccgacgcacacgcgtttctgcggggcttcgcccggtacaaaaccgaggatatcttcacgccaggtcggcttgccgcccaggtgcgaagccaggtggaccaccgggctgtagccgccggagctggctaccaggtcacactccagccattcacctgggctggtgactttatgcgctttcacatcgatcgcggccacgcgggcggcggtcacgtgcttgctgccacgggcttcgatcacggcgctgccggtgaggatacgaatgcctttggcgcgggcctcttccaccagcgcaccacgtgggttgtggcgcacatcggccaccgccaccactgcaaggcccgcatcgagccagtccagcgcaacgcggtaggcgtggtcgttgttggtcgacagcaccagtttcttgccgggtgccacgccgtagcgacgtacgtaggtggagaccgcaccggccagcatgttgcccggcacgtcgttgttgccgtacaccagcggacgctcgcacgcaccggtcgccagcaccacacgcttggcgcgcacccggtggatacgctggcgtaccacgccaatcggcgcacggtcaccgaggtggtcggtgaggcgttcgtgaatggtcagaaagttatggtcgtggtagccgttgacagtggcacgaggcagcagcaccacgtccggcagcgctttcaattcagcgatgacgctggcaacccattcagccgctggcttgccgtcgaggttttcacgcgaatccagcagcgaaccgccgaactcttcctgctcgtcggcgaggatcacgcgagccccaccgcgggcggcggccagtgcggcagccaggccagcagggccggcgccgacgaccagcacgtcacagtgacggttgaagttgtcgtaggtgtccggatcgttctcggtcggcgagcggccaagaccggcggccttgcgaatgtacttctcgtaagtcatccagaacgattgcgggtacatgaaggttttgtagtagaaccccggcggcatcagcttgccgccgaccttgccgaggatgcccatcacgtcattgttgacgttcggccagccgttggtgctggtggctaccaggccctggtacagcgcctgttgcgtggcgcgcacgttcggaatctgggtggcttcggtggcaccgatctgcagcaccgcgttcggctcttcggcgcccgcagcgaaaatgccgcgaggacgcgagtacttgaagctgcggccgataatgtcgacgccgttggccagcagggcggcggccagtgtgtcgccttcaaagcctttgtaggtctggccgttgaaagtaaacgtcaggactttattacggtcgatccggccaccgttggacaggcgattggtctggctcataccttctctccagaggccttggcggtgaattgtggcttctcaccgatcttgtaggtttcaagaatttcgtaggtcagggtgtcgcgggtcgcgttgaagtactggcggcagccggcggcgtggatccacagctcgtggtgcaggccacgcgggttgtcacggaagaacatgtagtcgccccactcttcatcggtgcaggcattcgggtccagcgggcgcggaatgtgcgcttggccggacgcgtggaattcctcttcggagcgcagttcgccacagtgaggacagaagatatgcaacatagggaatttctcctgttagtgggcgacggccgcagcgccgtgttcgtcgatcaacgcaccgttgtggaaacggtcgatggagaaaggtgctgccaatgggtgcatttcacccttggccaggctggcggcaaacacgttgcccgagcccggcgtggccttgaagccaccggtgccccaaccgcagttgaagaacatgttcggcaccggagtcttggagatgatcgggcaggcatccggcgtggtgtcgacgatgccgccccactggcggttcatgcgcacgcgggacagcaccgggaacatctcgacgatggcctggatggtgtgttcgatcaccgggtacgagccgcgctggccgtagccgttgtagccgtcgataccggcgccgatcaccaggtcgcccttgtcggactggctgatgtagccgtgcacggcgttagacatgatcacgctgtcgataatcggcttgatcggctccgacaccagcgcttgcagcgggtgggattcgatcggcaggcggaaaccggcgagcgaagccatgtgcccggagttaccggcagtgactacaccgacgcgcttggcgccgataaaacccttgttggtttccacgccgatgcacacgccgttttccttgcggaagccgatcacttcggtctgctggatcaagtccacgccgagggcgtcagcggcacgcgcgaagccccaggccacggcatcgtgacgggccacgccgccgcgccgttgcacggtggcgccgagtactggatagcgggtgttcttggagcagtcgaggtacggaatctcgtcggccacttgcttggcgttgagcagttcgccgtccacgccgttgaggcggttggcactcacgcggcgctcggaatcacggatgtcctgcaaggtgtggcacaggttgtacacgccacgctgggaaaacatcacgttgtagttcaggtcctgggacaggccctcccacagtttcatcgcgtgctcatacaggtgcgccgactcgtcccacaggtagttggaacgcacgatggtggtgttgcgcgcggtgttaccgccgcccagccagcctttctcgaccacggccacgttggtgatgccgtgctctttggccaggtaataggcggtcgccagaccatgcccgccgccgccgacgatgaccacgtcgtagaccttcttgggggtcggcgtgcgccacatcttctgccagttttcgtggtggctgagggagtgcttgaagaggccgaagcccgagtagcgttgcatagtcattactccaaaaccgcgctcagcgataaaccgggaaatcagcgcacagggcagacacgtgcttggccacgttggcctcgacatcggcgtcgccgaggttgtcgaggatgtcgcagatccagccggccagttcgatgcactgcggcactttgaaaccacgcgtggtcaccgccggggtgccgatgcgcaggcccgaggtcacgaacggcgactgcgggtcattcggcacggcgttcttgttgacggtgatgtgggcgcgaccgagggcggcgtccgcctctttgccggtgaggccctgacggatcaggctgaccaggaacaggtggttatcagtgccgccggacactacatcgtagccgcgtttgataaacacgctggccatggcctgggcgttgtcgatcacttgttgttggtaagccttgaagcctggctccagcgcttccttgaagcacacggccttgccggcgatgacgtgcatcagcgggccgccctgggcgccggggaatacggcggcgttgagtttcttttcaatttcttcgttggacttggccaggatcaggccgccgcgaggaccgcgcagggtcttgtgggtggtggtggtgaccacatcggcgtagggcagcgggttcgggtacaggccggcggcaaccaggccggcgacgtgggccatgtcgacgaacagcagcgcgcccactttgtccgcgatctgacggaagcgtgggaaatccagggtcttggagtaggcggagaaaccggccacgaccattttcggcttgtgttcgacggccaggcgctcgacttcgtcgtagtcgatcaggccggtgtcggtgttgatgccgtactgcaccgcgttgtacagcttgcccgaggacgacactttggcgccgtgggtcaagtgaccgccgtgggccaggctcatgcccaggatggtgtcgccggcattgatcagcgccaggtacaccgcgctgttggcggacgaaccggaatgcggctgcacgttggcgtaatcggcgccgaacagctgcttggcgcgctcgatggccagggcctcgactttatccacatgctcgcagccgccgtagtagcgcttgcccgggtagccttcggcgtatttgttggtgaggccgctgccttgggcttccatcacgcgtttgctggtgtagttctccgacgcgatcagctcgatatgatcttcctggcgctgctcctcggcattcatggccgccagcagtgcgtcgtcatatccctggatctggtcttgtttgctgaacatcgcgtctctcccagcctttcgtattgttgaggcccgtgcagggccctttgatgcgatggtagggctggcgcagacaggtcaaatgcctacgcacgccacgcaaaggtgcgtttacgacatagcgggaacaacgcggaaaaaatgtgggagggggcttgcccccgattgcaaagtgtcagccaccgcatctgcaagctggcccaccgctatcgggggcaagccccctcccaccagggtttatacgatgatctggcggatgagtagcagcagcaggaaatgcaggggatagagggtgtaggcccagcgacgcatggcgggtggcgagatgtttttcccatgtcgcaataagaccaagcctgccaatggcgcaatcaggcacgcagccaaccccaacagcgccacaggcgtgccgctatcgagcaggatttgccattggttggcggcgacacagaccaaacctggcaatacgctgaaataccatgggcgactgaacaccaatagcatagccagcggcagcaagaccccaaacaaaccgaacatcaactgcgcggaaaacacggccgcaatcgtgacggcaattagcgccaatcctcgatcaaaaagcgccttctgctgccatcctcgggcaaccagcaaacccagcgccagggttggcaacacattcaacgtatcggcatcctcgattaacatccgatacggcacctcgctgatcacgctgaacagcaacaaccagcccaggtaactcccgctcaccggcgcgtttttcgcccggtgcaaattcgccgcaatcgccaggcaaaaccacggaaatgccaggcgccccggcacatacaggccatccaggcttaaaccgacatagcgcaggtggtccagcaccatactcaacagcgccagccacttgagcagatccaaggcgccatcgcggacacgtccgacaggcatcgttccagtaccgtgcataattccccagtgactttgcatttacagagcgtgcgcacccgcgacaatcttggttacagtgcgcaccaacatcgaccacaggaatgggccatgaccgacaagagccaacaattcgccagtgacaactattccggcatctgcccggaagcctgggccgccatggaacaagccaaccagggccatcagcgtgcctacggcgatgatgaatggacccaccgcgccgcagacggtttccgcaacttgttcgaaaccgactgcgaagtgttcttcgccttcaacggcaccgccgccaactcgctcgcgctgtcttcgctgtgccagagctaccatagcgtgatttgctcggaaaccgcccacgtcgaaaccgacgaatgcggcgcgccggagtttttctccaacggctccaaactgctcaccgcccgcaccgaaaacggcaagctgaccccggactcgatccgcgagatcgccctcaagcgccaggacatccactaccccaagccacgcgtggtcaccctgacccaagccacggaagtcggcagcgtgtacaccccggaagaaatccgcgccatcagcgtcacctgcaaagagctgggcctgaacctgcacatggacggcgcacgcttctccaacgcctgcgcgttcctcggctgctcgcccgccgacctgacctggaaagccggtgtggacgtgctgtgttttggcggaaccaagaacggcatggccgtgggtgaagcgatcctgttcttcaaccacaagctcgccgaggacttcgactaccgctgcaaacaggccgggcagttggcgtcgaaaatgcgctttctttcggccccgtgggtgggcctgctggaaaacgacgcctggctcaaacacgcacgccatgccaaccactgcgcgcaactgctgagcagcctggtggcggatattcccggtgtggagttgatgttcccggtgcaggccaacggcgtgttcctgcaactgtcggagccggctatcgcagcgctgacggccaagggctggcgtttctataccttcatcggcaaaggcggcgcgcgcttcatgtgtgcgtgggataccgaggaagagcgtgtaagagaactggcggcggatattcggaaagtgatggaagcctgatgccacgggcatttcagcccgatttcagagactgtttgtacgtatttctgacagtatctatctagcccctgccctggataagatctcgtcaccccgaacgcaacggacgcgttgtttcggggctgactgcctgccgaatagtcggctggaaatggaaatcccacagagggcaacatcatggaaattcaatgctacacgactgattctcagcttcgatccgaggccaacgccaccctcgtcggcctggacgacctgaggaaactggcgaatgttggtgacactatcatcgagccttcaaggctctttaccgtcaccggtaaagagttcgaaatgacagcatccggtgcgtacatcatcaacctgttcgtgcgttaaccactgactgtgggaggggggcttgcccccgatggcggtggggcattaaccaatgcgctgactgacacactgctatcgggggcaagccccctcccacatttagaccggcttcgttagtcagaactcgatacgcacatcacccttcggcacgctgcagcacgacaggatgtagccttcggcctcatcttcctcggtaatcccgccgttgtggtccatctcgacctcgccgcccagcttcagtaccttgcacgtcccgcagatacccatgccacaagcttttggaatcaacaggccaagcttggctgctgctgcgtgcacggtttcgcccggcgccacgcgaatgctcttgcccgacgcaatgaactccacctggtgcagatccgccaggtcgatttccggtgcgtcggcggcctgctcggcttgctccaccgcatccgcacgggcctccggcggcgtggcgccgaaggactcctcgtgataccgcgtcatgtcgaaacccgccacttccagcaggcgcttcaccgcgttcatatacggcgtaggcccgcagcagaacacttcgcgctcgaggaagtccggcaccatcagttcgagcatcttgtggttcaggtaaccgcgataaccggcccatggctcacccaacccgtgtttctcgcagatcaggtgcaggctgaagttgtcgatccgcgacgccatgtgctccagctcgcggtggtaaatgatgtctttgggcgagcgggcgctgtggataaacgtcatgtcgacgttggcgttggtgtcgtagaaccaacgggccatggacatcaccggcgtgatgccgacgccgccgctgaggtacaacactttcgggctaggaaagtcgatggcattgaacaggcccaccggtccgtgtaccgcgagctcctggccctcgtgcaacgtgtcatgcagccagttggaaaccttgccgcccggcacgcgcttgatggtcaccgagaagctgtacggcaccgacggcgagctggaaatggtgtaggagcgcatgatcggctggccttcgatctccaactccagggtgacgaactgccctggcttgaagaagaacaggatcggctggtcggccataaagcaaaaggtgcgcacgtcccaggtttcctggatgactttgacgcaccggacgatgtgccgaccattggcccaggtctgggtggttaccggattcaggaaattattggacatgttgttctccaccgccgacgtcggccttatggtggcgattctgcgtaacgccggaaccacccatttacctatctgcgacattcacatacttatcgcgaccagcccccaacgacctagggttgcgcgtcgggaacagattgggccatgtcgcccatggataaggttctgacgttgcgcggccccacactcgctcccaacaacgacgctttctttatgccttgcgtagtacaaccgtagccactattcgccggccacacagaatggccatgaggacacacacgatggacgtcaccgcaaccttaagcttgggcgatccgctggaacccgcacgcaaggccaccgcgcagatgctgcaagagcgcgagcgcactttctcgctgccgcagccgttctactctgatgagcggctgtttgatatcgacatgcaggagatcttccagaaagagtggttgatcgccggcatgacctgcgaaatccccaccaagggcaactacctgaccctgcaagtgggcaaaaacccgatcatcgtgatccgtggcgccgaaggcgtggtgcatgcgttccacaacgtttgccgccaccggggctcgcgcttgtgcaccagcgacaagggcaaggtcgccaaactcgtatgccactatcaccagtggacctacgaactggacggtcgcctgctgttcgccggcaccgagatgggcgccgacttcgacatgaagcagtacggcctcaagccagtgaatgtgaagaccgccggcggctacatcttcatcagcctggccgagaacccgccagccatcgatgacttcctgtcgacgctgaaccactacatggaaccctacgacatggagaacaccaaggtggcggtgcaaaccaccttgatggaaaaagccaactggaagctggtgctggaaaacaaccgcgagtgctaccactgcaacgcatcgcacccggaactgctgaaaaccctgctggaatgggacgacgtcaccgacccacgcgccgaccaggcgttcaaggaccatgtggccgcctccgccgccgcctgggatgccgagaagatcccttacgcccacgccagcttcggcctgcgtaaccgcatcgtgcgcatgccgctgctcaagggcaccgtatcgatgaccatggacggcaagcagggctgcgccaagctcatgggccgcatcaagaacccggacctgggctcgatgcgcatcctgcacctgcctcactcgtggaaccactgcatgggcgaccacatcatcgtgttcacggtgtggccgatcagcgcccaggaaaccatggtcaccaccaagtggctggtgcacaaggacgccgtggaaggcgtggactacgacgtagcgcgcatgcgcgaagtgtgggacgccaccaacgaccaggaccgtcgcctggccgaagagaaccagcgcggcatcaactccaccgcctaccagcctggcccgtattccaagacctatgagttcggcgtggtgaacttcgtggattggtacagcgagcgcatgctgaacaacctgggcgcagcaccggcaccgtacctcaaaggcgtgcctgtacagggataaaccgctttttgtagtgagcgggcttgtcccgcgttgggcggcgcagccgccctgaaaccagacaccgcgacctgcctggcagagcgcggtgtttttattggggcggctgcgccgcccagcgcggggcaagcccgctcactacaaataatctgcccatgccgcaagctgggtattttttgatcacttccttgtaagccaggtgttacctgggctgtgaagcagcaccaacatcttatccacagaaacgcgcacagactttgtgggcaactgtgctgcgcactgtggaaaactcgccgtgaccccaggtaattcgagaataggcacaatcgatcattttttgatcacaccgatcaaaccccttgtttacgggccttttatcggatagcaaacatgttatccacataaccaccaacagactttgggggcaacttttaatcctttgtggaaaacccaataaagaccatgaaaatcaaggcttccactgacattttcatgccaaatgcgcgattctggtcatattttaatcacccccaccaaagcctttatttataagggctagagccgacagcgaacatcttatccacagaagcgccaacagactttgggggcaactctgcatcggagaatcagcttgattggcgaaaaacctgaataaaaaccgtcagttagcctggttgtttttcgtacagagggctggagagcttgaaatacaaggggtgcggacagccgcgaacaggttatccacaagtggatcaacagggattgtgggtaagaaccctgtaggaggaggcaagcccccttctacagtctgggttcagcgcaccacgccttcttcgatgagtagctggagaatggcctctgcgcccgcctcagggctcaggcctttgagcacctgcccaccaccgccactggccttggccgttgcagccttcatacggtcagcgccgcttttggccttgatcaccttgaggcgcttgggccgtggcttggccggctgcaacaccgcagcattgaacaactcatcctcttcaatctggacgtcatgcgccgccaactcgccgcgctgcgccgggccgtaggcgctttgccgtggcttgggtgcagcgttatccacggtcgccaggaacggcaaacgcaccttcaagcgccgccgctgaccacggggcaaggcttgcagcacatgggccacgccgccctcaatggactccacctgcgccagcccgacgatcagcggccagcccagttgctcggccagcaggaacggcagcatgcccgagccttcaccggtttcggcctggctgccggcgagcaccacctgggcaccggcatcgcgcaggtactcgctgagcaccggcaacgcatcgctgcccgccggttgctccagcacatgcaattgcggcaggcccatgcccaggtagctgcgcaaggtcggttcggcgatgttgccggcgtgcagcacctgcaacttatcccccgccatttgcaggcccagttccacggcacgcgcatcctgctcggcacggcgcgggcgcccggaggtagggtgggcgccgatggacaccaggctgattacattcgtgttcatgaccatatccttaagctgcatcgcgcttggcgccattgcggtaggcctcgaccgctgcgatcaaggcatgcagtattgcggcgctttcgccgatcaccgacaggtcggcacgcttgatcatgtcgcagccagcgtcgaggttgatcgccaccaccttgtcgcaagcaccgatgccttgcaggtgctggatcgccccggaaatacccacggccacgtagacccgcgccgtgacccaggtgccgctggcgccgacctggcgatcgcgcgccatgaagccatcgtccaccgccacccgcgaggcgccttcggtggcgcccagggcggcggcggtctggtggaacagcgcccagtccttcacgccgttgccgccggagaaaatgaactctgcctcggccatcggaatcgccgccgggtccaccgccaccgcgccgaggtcttcgatgcgtggcaggctgcgtgccagggctgtggataactctacgggcagcacttcgtgacgggtctcgctgaccgggtcggcacattcggcagccgccaggatcaagcgcggcagtggccgagccaagtcttcctggccagcaccggcacggccgatgcactcgtcacccttgatctgccacacccgcgtggccgggcgctccttgaggctggcggcaaagcgccgacccaactcgccacccccgctgcggctgtccggcagcagccagtggcgcgggttgagctggttatccacagcccgcaggccctggacgcgttgctccggtgaataaccgtcgaatgcatggccttccagcaccagcaaacggtcggcacccgccgtggcaaacgcactttccttgtgttcaccaaacaccaccgccagcaccgcgccgtcgctgccggccagttgccgtgccaggccaagcaggtcgcggtcgtgactgctcaggcggccgccgaccatgtccggtaccacgttgatgtagaacgcgggggctgcaatctgatgcagcggcaattgcacttccaccgctgccgtacgtttggccgcaccgccctgctgggcgccactgcggtcgatgcgcttgatgccgttggggccgataaaaccgacgccatgcacattcttgcggatgacgccgttaggccccatccagctgtgctgcaccggttgcattgccgcatgcagcgggtgcaggcggttgcgggcgatccattcggcccgtgggtcgcggcggataatgtcgctcatcagtgcacctccgcaggttcacgcttgagtggggctttggccggtgcagcgccttccagcaatgcgtcggccaccagctcggcaatgtccttgatcaatgggcgcggctcgaccacgccttccagcatcgcggtgcattgcgggcaacccacggccaccagctcggcaccggtttcgcggatgtcttccatgcgcatatcggggatacgttgcttgccgggaatgtcagtgatcggcgcaccgccaccaccgccgcagcagcgtgaacggaagcccgagcgttgcatctccttgacctcgatgcccagagctcgcagcacttggcgcggcgcctcgtattcgccgttgtagcggcccagataacaagggtcgtgataggtcacgctgttacctttgtgctgccccaggttcaacgcgccctcaccgatcaactcggccatgaaggtgctgtggtgctgcaccacgtagttgccgttgaaggcgccgtactcgtttttcagcacatggaagctgtgcgggtcgcaggtgacgatgcgcttgaagctgtacttggccagggtctggatattgcgcgaagccagcagttggaaggtcgcttcatcgcccaggcgccgggcgacgtcgccgctgtcgcgttcttccaggccgagcacggcaaagtcgaccttggccgctttcagcactttgacgaaggcgcgcaaggtgcgttggttgcgcatgtcgaacgcgccatcaccgacccagaacagcacctcggcactacctttttcgctaagcaatggcaggttcaaatccgccgcccagttcaggcggccacccggcgcgaagccgccagggttgtcggtggcgatcaggttttccaggacttcggcgcccttgttcggcgtggcgcccttttccaaggtgaggtggcggcgcatgtcgacgatggcgtctacgtgctcgatcatcatcgggcactcttccacgcaggcacggcaggtggtgcacgaccacagggtctcggcgtccaccaggccgttgacgatcggctggtgcgggttgccgccgtgctcgcccacgggtttgcccggatacgggctgccggcgaacctggcatcggtgccgccagccaggccgaccaccatgtcctggatcagctttttcgggttcagcggctggccggcggcgaacgccgggcacgcggcttcgcacttgccgcactgcacgcaggcgtcgaaaccgagcagttggttccaggtgaaatccttgggtttctccacacccaggggcgcagtcttgtcactgaggtccagcggtttcaacccggtggaacgcccaccgccaaaacgctcggcgcggcggtgccaggccaggtgcagagcaccggcgaaggcgtgtttcatcgggccgccccaggtcatgccgaagaacatctcggacacgccccacagcacaccgacgctgagcaatgccgcgagcagccagccgccgaagtccgccggcaggatcccggccaccggcagcgttaccaggaagaaactcaccgagaacgccatcaggcttctcggcaggcgcatccacgggcctttcgacaggcgcgacggcgggttgcgccgacgcagatagacgaaggtggcgccgacaaacatcagcaccgaggccagcagcaaggcgtagccgaggatacggttgtgcaggccgaaaccgtggaccaggatcgccagcaaggccgacagcacgaagcccaacgcggtggcgacgtgggtattggcgatgtatttgtcacgggcgaccacgtggtgcaggtcaaccatgtagcgcttgggcatggccagcaggccgcccagcaggtcgaccttggacgcgcggccacggcgccacatgttcacccggcgcagggcgccgaggacggcgaggcccagggcggtaaacaagagaataggcagcaaggtgttcaacatggtgaagctcccacagaccgcacaggtctactgtgaaactggcgctgaatgtgggagggggcttgcccccgatagcagtgggtcagctacagctgtatcaactgacactccgccatcgggggcaagccccctcccacatttggagcgagtacacattggttcaaggctggctcagaaatctttgcagaggcgcagggcgtcgtagatcgcagcgtgggtattacgctgcgccacacagtcgccgatgcggaacagcaagtacccatcgcccgtctcgctaaggcacggctgcggcttgatcgcgaacaaggcttcgacgtcgatctggcctttgttgcgcgagccttccttgagcgcgtagtagatggcttcatccggacgcacgccgttctccaccaccacctgatcgaccacccgctcctctttggcgccggtgtattcgttctccagcaccgccaccagcttgtcgccctcgcggtagaccttttccagcatcatgtcgccggtcatgatcacttccttggggtacatgctgcggtagtaggtcgggaacgacgtaccgccgatggccacgcccggcttgatgtcgtcggtgacgatctcgacctggctgcctttgtccgccaggaaatccgccaccgacataccggtgaattcgcagatggtgtcgtacaccagcacgttcttgcccggcgccaccttgccgtcgagcacgtcccaactgctcaccaccaagccttcagcggcgccccagtgttcgttctgctccacattcgggtgcccgcccaccgccagcaccaccacatcggggcgcaggtccaggatggtgtcggcatccgccgccacgcccaggcgcaggtcgactttcaggcgcgccagttccaactggaaccagcgcgtaatgccggcgatctggtcacgctgcggcgctttcgaagcggtggtgatctgcccaccgataaattctttcttctccaacagagtcacatcatggccacgttcggcggccacgcgcgcagcttccatcccggcaggaccggcaccgaccaccacgaccttgcgtttgacgccggtggttttttcgatgatatgcggcacgcccatgtattcacgtgacgtcgcggcgttctggatacacagcacatccaggccctggtactggcggtcgatgcaataattggcaccgacgcactgcttgatctggtcgatctggcccatcttgatcttggcgatcaggtgcgggtcagcgatgtgggcgcgggtcatgccgaccatgtccacataaccgccttccaggatgcgcgtagcctggttcgggtccttgatgttctgcgcgtgcagtaccggaaccttgaccacttccttgataccggcggccaggtgcaaaaacggctccggtggataactcatgttcggaatcacgttggccagggtgttgtgggtatcgcaacccgagcccaccacgccgatgaaatcgagcatgccggtgtcgtcgtaatacttggcgatctgcttcatgtcctcgtgggacaaaccgtccgggtggaactcgtcaccgcacaggcgcatgcccacgcagaagtcgtcaccgacctcggcacgcacggccttcagcacttccaggccgaacttcatgcggccttcaaaggtgccgccccattcgtcggtccgcttgttgacccgtgggctccagaactggtcgatcatgtgctggtgcacggcggacagttccaccccgtccaggccaccggccttggcgcggcgtgcggcctgggcgtagttgccgatcacgcgccagatttcttccggttcgatggtcttgcaggtggcgcggtgcaccggctcacgcacgccggacggcgacatcagcgtcggccagttgaagccgtcccaacgcgagcgacggcccatgtgggtaatctggatcatgatcttggcgccatgcttgtgcatggcgtcggccaggttctggaagtgcgggatgatgcggtcggtggacagattgaccgaactccaccattcctgcgggctgtcgatagccacaacagaggaaccgccgcagatcgccaggccgataccgcccttggctttctcttcgtagtacttcacatagcggtcagtggtcatcccgccgtcggtggcatacacctcggcgtgggccgtactgagcacgcggttgcggatggtcagtttgccgatctggatcggctggaacattgcttcgaaagccatggcacggtcctcggcttacaacggcttgacggtgaacaggccgtcatcgtggccctcttcggagcctccgtagacttgttcggccacagtgcggatcttgctgccacgggcctcaagaatctggtccatggcaccggcaaaccagccggtgaacatgtagtcgaccttgcgcccgaccttgccgtacacgtagacgaacgccgagtgttcgagcttgacgctggcggtgcctttgtcgaggtcgatgtcctggatcttgaacaggccccagccgcgttgcgacaggcgcttcatgtagtgctcgaacaccgcgacgccttccaggccgtggcattcggcttctttctcgcaccagtgccaggcggacttgtagccggccttgtagaggatttcggcgtaagcctcggcgcccagcacttcttcgatgcccatgtggttgttgacgaagaaatggcgcggcacgtacagcatcggcagggcgtcggaagtccagacaccggtttcgctgtcgacttcgataggcaattgcggggcgatcttggccatggaaacttaactccagaaaattcttgtgtagtgccccggcgcggatggccggggaagaagatgcggtggcggtggcttactcgccccagacgtccttgaggacgttgacccagttctcgcccatgatcttgcgcaccacacgctcagggtggccgcgtttgagcagggtctcggtgaggttggggaactcgcccacggtgcggatgcccagcgggttgatgatcttgccgaagctggtcaggcggcgtgcatagcccttgtcatgggtcagcatttcgaagaaatcctggccatggccctgggtgaagtcggtgccgatgccgatggcgtcttcgccgacgatattcatggtgtattcgatggcttcggcgtaatcgtcgatggtcgaatcgatgcccttggccaggaacggcgcgaacatggtcacaccgacaaaaccaccgtggtcggcgatgaacttcagctcttcatcggacttgttgcgcgggtgttctttaaggccggacggcaggcagtgggagtaacacactggctttttcgattcgaggatgacttcttcggacgtcttggaacccacgtgggacaggtcacacatgatgccgacgcggttcatctcggcgacgatctcacgcccgaagcccgacaggccgccgtcgcgctcgtagcaaccggtgccgaccaggttctgggtgttgtagcacatctgcaccacaccgacgccgagctgcttgaagatttcgacgtagcccaactggtcttcaaacgcatgggcgttctggaagccgaagatgatgccggtcttgccctgttccttggccttgcggatgtccgcggtggtcttcaccggaatcaccaggtcgctgttctcacggatcagggtctggctggccacgatattgttgatggtggcctggaacccttcccacaccgacaccgtgcagttggcggcggtgagcccccctttgcgcatgtcctcgaacaggtcgcggttccacttggcaataatcagcccgtcgataacgatgctgtcggcgtgcaattcggctgggctcatcaggcgtccccttattggcgattcatgcgccgaatcgtctgccggcgctttggggccagcatatgcccaggggccgacagagccgggtgcaaaaacgacaggggaattgccgaaagcgtcaatccgcgacaaaggctgttaagagaggtctgactcgcggctgttctttgtcttacgcttgagccagaattcgggcattacctgatatgagacggcgcaatgaaatcgattttcctggctttggcactcatcgcaaccggcgtccacgcggctgaagacaccgacagcacgccgtgcgacggcatcgaaaacgacaagcaaaccctggaatgcgccacctataacaaaaccaccgccgaacaactgctcaaagacaactatcaaggcctgctcgaacgcatggcgtcgacctacggcagcgacaagaccaagctggcggacattaccgctcgtctgaaggatgcccagcagaagtgggaaaaactgcgtgatgctgattgtgccgtggacaccttcccggcggtgaccggcaccaaggcctatgcgattgcacagaatgactgcctggcacggatgagtgatgagcggtcggagtttttggagtcgattgggcaagagtgacggttaaaaggccttccatattgagttgaaggccatttgcagatgatcacgctgagtcttgtcgatattgaggtccgcgcaatgctggccccactgcgataaggcctccatcgtctgctcgatgtaaaggtcgggctcgagaaagctgaagggtgcgcagaccttcttgatcgcctggcgtgatggctggcctgcacctgcaaaagcacaggtgtgctcattcccgccaccgctggtagtggcaaacgtcaggtcataggctggcgccatctgccagccagccgaagagccgaagaaagagaagtttttcgcgtgatcgtcgcgattgtgtgccaacgcattgaagaccatcagccgggccattttctgcacatccccggcgttttgggtgatggcgaaggtcagacgcaacaggtcgccgtagtcaaggctgggcatgcggaaatcggcatacaggatcgccgcgctggtcagcatatgacgcttgatgtggccggtgcggtcaaagcgtcgagtgctgaagaaacgttctacgccggtatccgtctgcacctcgagcaagcttgaatccgagatctcgacccccgcgttacgagcgaccatggcgtaggcttgctcgatagcgccactgtcgcgaggctcgtcctggctgcggaatttgatcaaccagtgttcatagccttcaggcatatcgccaaatgaagagatggcctgcgtcttgtcggccgaaagcccaatcaccgcttttggtcgcgcaccaccgggagagccgcccgccaggcgcaatgactcgatcacctcatgcgtttccccagacaacacgttttgcgaagcctggtaaagggaggccaggtccaactcgcctggctctggatccttctcgaacatcggcctgtactccagcgcccccatgccccggttgcccatataggccagccggtccaatgggcggatcgtacgccgttcaatccccagttccatgcgaaaaaaccggtccatcagcaacagcccccagccatcgggcaacgaatcgctgaacgctcccggcaggccaccgaacagcaacgggtcggctgccaactgaggcgtagaagagaagtccatgtacagcggcgccaagttgaagccgttcgccagccaacccggatcatacgaaaaataaattcccctgccgggcgcatccaccagctcaccgacgtgtgaaccttgcaacatgacgtgcaatgcggagactgttttcatcgacgtcctcgaagcctggtttgacctttcaattcctgaagactgatcggcggcggcgcgctgaacagattcgccatttgtgcgcctacccccaggctcatcgcaatcagcagcaaggcatcaagggaaacctttccggtcgtttcaaagcgcttgagcgtggactcggcaacccccgactgggctgccagggctcggcgagaaaggttcttgctcagccgcagcgccttggcattccctgcgatctgcaaagcaatctcgccgggggcgtagagaatatgagtaagggccatggttcgacctcaagtgagtgttagcaagtgtagcaggcgctgaataaacctatcacataacggacaacgggttatccaaaaatagactttattgttaataacagacaatattttatctcttatatttttatgagtttcatctggcctgcgacacctttgacccttctcgaaaggtgcgcgaccatctgcgccatctcacatccttcaaggccagaccatgaaaacctgcggcatcgaaatcaaaggcagcgaagccatcatcgccgtcgcgtcactggacaaccagacgctggcccacgtcgccctggcgaccaagaaaattgccctggaagacgacgacgaggccgccaacgtcaaagccttcgccgcacaggtaaaggcatttgtgcaggaaaacgccatcgagcgtatcgcgatcaagaagcgcagcaagaaaggtgaattcgccggtggcccgaccacgttcaagattgaaggcgtgtttcagttgctggatggggttgaggtgacgttgctgtcgccgcagacccttaatgcgcagaataagaagcacaacttcgaactgccggcgacgctgaacaagtatcagcatgaggcttacaaggcggcgtgttcggcgctgctgaagaaataggccacatcattaatctactgtgggagggggcttgcccccgatagcggtgggtcagccaacgttgtatcaactgacagcctgtcatcgggggcaagccccctcccacatgtcagcgcttgttgcgcagccagtcgccaaaggttttgtcctccagggcataccctccccggctcgacttccacaccagctctttatcgcgaagggcatcgatacaggcctgaatcgtctgggtgcccggcaccacgtcgctgcccatgtcctccagcgccttgctgaccgccgttagggtgctgtcggtgaacggcgcgaagggttcgttgttttgcgagcgctccaccatcacttccagaacggcgcgctgggggatggtgaggttgttccaggcgctttcgaattcggtccacacaccggcacgcagcagttcggcacgactgtgcagcaactggccgaggttgctggcctcacccagctccagtgccacttcaccgatgatcgtgcgcaacatctcgggacgccggccgaccagttcaaaggcttcatcaatatcggcggcgttgaattggttggtcttggccaggtgcgcgttgaggtgcgcggtgtaggcctgggtgaactctttacccagcagcgggaacggcgtgatgctggagccgaagaacggctgacttttacccagtaccaagtgagccagcttgtcgcgattggagccggtgaacaccagatgcaaaccgctgccgtcctcgtcacgcccttggttgagctgatcccgggcagccttgagggcgaacatcgcattgatgcctgaatcgctggtcaaggcgtgctgggcctcgtcaatcaccagcacgaccggtttttccgcagcgcggtggagcaactccaaggcctgggtcaacgtcgcgccaagcggcaattgaggcttgctgaagtcccaggacagggtacgcagaaagctcagtttctcgattccaatgtgcttggccagcttgcgaatgcccttttcatagggcaccagcgcggcagcaatagcactggcaatcaactccgcgggatctttctctttgtctgcccacagatcgacatacacggtaagccaacctcgaagctgacactccgggatcagatcttcacgtaaaaaagtacttttgcccgtacgacgcggcgctgcgagaaacaggccagaggtgaaatcctggatgcctgcgcctaccagcccgtcggcaatgctgcaagccagggtggggcggcggaatacaaagccgctgtgcttggacatggttttatactcaattatggaaaggactataaattatagtcgcgagtataattgactataattgcccattacaccacctcccgtcgccgatcctccctcggacatttcgcaaaccgcgcccgataactgcgggtgaagtacgacggcgactcgaacccgcacgcaatactcacctccagcacgctcataccgctttggcgcaagagctgccgggctttttccaggcgcaggccaaggtagaagttgctcggggtgtcgttcaggtgcaggcggaacaggcgctccaactggcgccgggtgactttgatcgcctcggccagggccaaggtgctcagcggcggttcggtgtgctgttccatctcaccaatcacttgcaccaattttttgttgttgatgccgtagcgtgtggcgatctgcatgcgctggtggtctttgcgcgggcggatgcgcccgagcacgaattgttcggagacctggatcgccagctcggggccgtgggcctgggcgatcaggtcgagcatcaggtcgatggaagcggtgccgccagcgcaggtgatgcggcggcggtcgatttcgaacagttcctgggtgaccgtcaggtgcggataggattccttgaacgcgtcgatggcttcccagtgcaaggtgaggcggtggccgtcgagcagcccggcttcggcgaggacgcaggcgccggtgtcgatggcgccgagggtcacgccatcgtgatcgaggcgacgcagccagtgctccagcgcaggcgtggcgaactgcagcggctcgaagcccgccaccaccaataacgtcgcgccctttttcaacggttccagcgcagcgtcggcgttgaccgacatgccattgctcgccagcaccgcgccgccatcggcactcaatacatgccagcggtacagctcgccacgaaagcggttggccacccgcagcggctccagcgcagagataaagccgatggccgaaaagcccggcatcagcagaaagtagaaatcctgggacatggtggcgctctcgtaggacgggcagcgtgctcactgtgatacgccagttcaacgagccattcaagggcacaggtcgctgcagtgcaagagctggtcgccgccgtgcgttttgtcggccctcaagctgcgtaatttgatcccacggcgcacaaagacgccggcccccacaataacgacctgccgagggacccaccatgaaccgactgatcagccgctgcgtgctcgcactcagcgccagcgccatcttgagcacgaacgtactggctgccgacgcggcatcctgccagaacgtgcgcatgggcgtggtgaactggaccgacgtaatcgccaccagcgccatgacccaagtgttgctcgacggcctcggctacaagaccaaacagaccagcgcctcccagcaaatcatcttcgccggtatccgcgaccagcgcctggacctgttcctgggctactggaacccgctgatgacccagaccatcacgccgttcgtcgacgccaagcaagtcaaggtgctcgacaagcccagcctggaagacgcccgcgccaccctcgccgtgcccacctacctggcagacaagggcctgaaaaccttcgccgacatcgccaagttcgagaaagagctgggcggcaaaatctacggcatcgagccaggctcgggcgccaacacccagatcaaggcgatgatcgccaagaaccagttcggcctgggcaaattccagctggtcgagtccagtgaagccggcatgctcgccgccgtcgaccgcgccgtgcgccgcaaggaagccgtggtgttcttcggctgggcgccgcacccgatgaacgtcaacgtcgccatgacctacctcaccggcagcgacgacgccctggggccgaacgaaggcatggccaccgtgtggagcgtcactgcaccgaactacgccgagcagtgccccaacgtgcacaaactgctgaccaacctgaccttcaccgccgccgacgagagccggatgatgcagccgttgctggatcacaaggacgccatcgagtccgccaaacagtggctcaaggatcacccgcaagaccaggcccgctggctggaaggcgtgaccaccttcgacggcaagccggctgcggccaacctgcaactgaccagcaaataacctgattcgaatcaccgtgtcgcagccattcccggctgcgcacggcatcactacgcccgcctgtaaggaacctgcctcatgaaccacgacgtcatcatcacctgcgcactcaccggtgctggcgacacgaccagcaaaagcccacacgtgccggtcacccccaagcaaatcgccgccgctgcggtggaagccgccaaggccggcgcgaccgtggtgcattgccatgtgcgcgacccgcaaaccggcaagttcagccgcgacgtcgccctgtaccgcgaagtgatggagcgcatccgcgaggccgacatcgacatcatcgtcaacctcaccgccggcatgggcggcgacctggagatcggtggcggcgaaaacccgatggagttcggccccaacaccgacctggtcggcccgctgacccgcctggcccacgtcgaagcgctgctgccggaaatctgcaccctggactgcggcaccctgaacttcggcgatggcgacaccatttacgtgtccaccccggcgcaactgcgggcgggcgccaaacgcatccaggagctgggcgtaaaggccgagctggaaatcttcgacaccggtcacctgtggttcgccaagcagatgatcaaggaaggcctgctcgacaacccgctgttccaactgtgcctgggcatcccatggggcgcaccggccgacaccaccaccatgaaggccatggtcgacaacctgcccgccgacgccgtgtgggcaggcttcggcatcggccgcatgcaaatgccgatggcggcccaagcggtgctgctgggcggcaacgtgcgggtcggcttggaggacaacctgtggctggacaaaggtgtgcttgcgaccaacggccagcttgtggagcgggcgagtgaaatcctcagccgcctcggcgcacgggtcatgaccccggccgaaggacgcataaaaatgggcctcaccaaacgccgctaatcaaaaaatgtgggagggggcttgcccccgattacggtgcatcagtaccgaatgtatcgactgacacaccgctatcgggggcaagccccctcccacactgggccaccgaaatccataggaatgtgccatgagctttatcactgaaatcaaaaccttcgccgccctcggcagcggtgtcatcggcagcggctgggtgtcccgcgccctggcccatggcctggatgtggtcgcctgggacccggcgcccggtgccgaagccgcactgcgcaagcgcgtcgccaacgcctggggcgccctggagaaacaaggcctggcgccgggtgcctcgcaagagcgcctgcgcttcgtcgcgaccatcgaagcgtgtgtgaaagacgccgacttcatccaggaaagcgccccggagcgcctggagctgaagctcgacctgcacagcaagatcagcgcagcagccaagccgaatgcgttgatcggttcaagcacctcgggcctgttgccgagtgagttctacgaaggttcgacccacccggaacgctgtgtggtcggccatccgttcaacccggtttacctgttgccgctggtggaggtcgtcggcggcaagaacaccgcgccagaagccatccaggctgcgatcaaggtgtatgaatccctcggcatgcgcccgctgcatgtgcgcaaggaagtgcctggctttatcgccgaccgcctgctggaagcgctgtggcgtgaagcacttcacttggtcaatgacggcgtcgctaccaccggcgaaatcgacgatgcaattcgcttcggcgctggcctgcgctggtcgttcatgggcacgttcctcacctataccctggcgggtggcgatgccggcatgcggcacttcatggcgcagttcggcccggcattgcaattgccgtggacctacctgccggcgccggaactgaccgacaagctgatcgacgatgtggtcgacggcaccagcgatcagttgggcaagcacagcatttcggcgctggaacgctatcgtgatgattgcctgctggcggtgctggaagcggtgaaaaccaccaaggccaagcacggcatgaccttcgctgaataacggaaaccccgacatgcccgcactcaccacctacaccacccaggtccaccccgactgggtggactacaacggccacctgcgcgacgcgttctacctgctgatcttcagctacgccaccgacgcgctgatggacaccctcgggctggacagtgaaaaccgcgaagccagcggccattcgctgttcactctggagttgcacctgaactacctgcacgaagtgaaactcggcgccgacgtggaggtgcatacccagctgatcgcccatgacgccaagcgcctgcacctctatcacagcctgcacctggtgggggatgagaaggaactggcgggcaacgaacagatgctgttgcacgtggacctggccggcccgcacgccgcgccgttcaccgagaccacactggaaagactcactgccatcagcgccgagcaggctgacctgccgcgccctgccctgctcggccgagtgattggactgccacccaaaaaacgataaggagccaccatgcaaaccgccgccgctgttgccgatttccgtacctacccgaagatctgcgacctcgcgcaggtgcgggtgctggatgatcagattcgtgtgcaatgggccgatgggcggaccagcccgtttcatcatcagtggctgcgggacaactgcccgtgcaccgagtgcgtgtacagcgtcacccgcgagcaggtgctggagattgtcgatgtggacgagcacctcagtgctgtcgacgctcgcatcgagcaaggcttgctgagcgtgcaatggcgcggtggccaccgcagccagtacgatcccggctggctgcgggcgcatgcctacgacgatgagtcgcgtgccgaacgccaggcggcgaaacccaaatcccagctgtgggacaaccgcttccagctaccggttttcgactattcagcagtcatggaagacccgcacgcattgttgcagtggctgctggcgctacgcgattgcggcctcactcaaatccgcggcgtccccaccgagcccggcgccctggcgctggtcgccaagcgcatttcattcatccgcgagagcaacttcggcgtgctgttcaacgtgcaatccaaggccgatgccgacagcaatgcctacaccgccttcaacctgccgttgcacagtgacttgcccacgcgggagctgcaaccgggcctgcagtttttgcattgcctggtgaacgatgccgacggtggcgaaagtatttttgtcgatgggtttgccatcgcctgcgccctgcgtaccgaagaccccgaagcgttcctggcgctgtgcgacatcccggtggagtttcgcaacaaggaccgttacagcgactaccgccagttggcgccgatcattgcgctggatgccttgggcgatatagctgagatccgcatggccaactttctacgcgggccatttgagaccagtgaggaccagatgccgttgctgtatcacgcctatcgacgctttatcgccatgacccgggaagatcgctttcgtgtggtgcagcgcctgaacccaggcgagctgtggtgcttcgataaccgccgcaccttgcatgcgcgcaacgccttcgaccctgcttccggtgcgcggcacttccaggggtgctacatcgaccgggatgagttgctctcaagaatccgggtgttgcagcgataacattggactgattgcgctaggttacctagcgctcctcaactggcaaatttgcggcctcaagggcctctttcttttctacagcggctgcaatgagaggcgccatctcacgcagcatttctaaatcgccactcttctcataaaggctcagccatttgcgtcgaggcctcataatccgttcatcatccctgatggggagtttcttgagcgtattttccgcgcgctctcggaactcggctggaacagcatccgttaacaccaactgaagagatggcagactgatttcgaaccatccttcctgcacttcaaatgggtccaacaatccagcagccacttgcttgcttttagagctgttaatccatccgtcaatgtatcgatagttcgaccattcgtaagcaagcaatcgatcctcgttgtaactgacaccatgatcgacagtaccactggggatatacatcgcggcataaccacaccggtcataaaacccgtccgccagcgcatgcctgaagggtgaccacaagtctcttggtctctcggcagtcgggttttccttaagccaaacaccacccggttttcgacatttttcatcaaacttatctggctccgggataggattcgacacaggcgtcattattttttccctttcgttgctttttcaggtttgccctgagaaacgacccagcgtggccaaaagtcatcaagacctggtaaaacccgaaccaactcttgatgaatagctgacttcgtactcaacttttctggcagctgttccttatcaccacgcatccatgcctcggcggcttcgattgcgtcttctgcggcaactgaacgggcctgttgcaaaccaaaaacatccgagactagccagttcacgacatcgccttgcttggaccacacctctttagtgaccttggcttctccagcctcaaggtgaatgttgaaaacggcatctttctcttcaataaactcaggctcggccgaggccaataccagtggggagtgggtcgctacgatcagctgcactgcaactttttcttgcgtcatctcctctaccactttcaaaagagcaggcacgatccgacgctgccattgaggatgcaaatggcattcgacttcgtcgatcaggaaaataatttctttggcagggttaacttttcgctgcttgcaggcgcgcttatggccattccaagtccagacaatcatgtaggccagcgcagcaattcgacgcattcccgcagaggcatgaaccagtgggacgtcaaggccataggacatgcgcaatgttggatattcggtctcgtccagagggcctatatggcagggctcgcccggcgacaacttctcaatgcccgatggcgacaatgcatccaatgcgactgttaactctttgaaagaagggtctcccgccgttcgctgccaacgaacccagtcatgaattaaaccattacatatatttgttcccttttccgaaattgcccctttccatacctcatcgggagaaaagttaaacgctcgaattttctcttcagttccagcctgctgatccgtccaatagttacgcgcagggtcccaagcagaaaaactgccatccaccccagcataaataacaattcccgggatggatggtcgagccttaggctggcgccaaaaaccgtctttgaaatgaacctcaccttccttgtctccagccgtcaccttgctgaacgcaaaaccaatactagccgcattggaggattctctaggaatcgcctctgctccacgtgcccaagtgcgcgtcaaagcccaccaggcagcatccagcagaaagcttttgccgaggccattgtcacccgtgatgaagttgagacgaggcgcaaactcaaccggcccaaacttttcagcagggccgacacctttgagagacaggagctttagcattgcattaccttttgatttgcctgagagcgtgggctaggttggacgccaacaacgctggtaaagcccacccgtgtaagtaaacagcatataggcattccgggcatttgagctgcggcaatgctaatgccaaacaataacgactagctatcccctattcatcccacccttctagaaacggggcgcccaaaacaaaaaagccccgatcaagccgtgacaagatcggggcatagcgctttgtgtgagccttgcatcccgagggtgaccaaaccttcaaggtgcgtgctggtgttcagtgtgcccattactgctatcggtatatgacccgaaaacgacctgctcatagccatctgagccattcgtggattctgcccttgccgaccggtcggaggcctaccagaatcccaatcaagccccgttccctacaccaggataaacgtcatgatgcatgcggatttgattgaccaggatgacctgctgggccaactgcgctcgctgggtttcgaagtctccagcggcgccaccgccgagcaggcctgcgagtgcgcggtgcgtggtttgagcgaggcgcgggccaaggcgctcaagggcatggtggagcagatgtacaccggcagtgcaacgattctgccggccgtgcgccaggcgatcgataagcagctgttgccggcactggtgcagttcaagcagaactcccgcgcctgatcgattcctatcgggggcaagctccctcccacctttgactgtgttcacccatccaaatgtgggagggggcttgcccccgatacagacacctcggtctagagccgcacgctggcaaacgtcgactcgttgcgcgcctggctcaacgccgacatcggccccgacaacggtgacaacaccagcgcctgcggaatcggcatcatcgccacctgctgggtggtgttggagccgacgcgctcatctcttggcggaatgccgaagtattcgcggtagcacttggagaaatgcggcgtggacacaaacccgcacaccgacgccacttcgatgatcgacatcggcgtttgcttgagcagctgccgtgcacggatcaggcgcagcttgaggtagtaacgcgacggcgagcagtgcaggtacttctggaacaaccgctccaactggcgacgggagacggcgacgtacaccgccagctcatccaggtcgatcggctcttccaggttggcttccatcaacgccacgatttcctgcagcttcggctggttggtgccgagcatgtgcttgagcggcacgcgctggtggtcttgctcgttgcggatgcgctcgtacacaaacatctcggagatggcggccgacagttcgcgaccgtgatcgcggctgatcaggtgcagcatcatgtccagcggcgcggtgccgccggagctggtgaagcggttacggtcgagggtgaacaggcgagtgctcatggccacgcgggggaaggcttcctgcatagaggccaggcattcccagtgcacgctgcaatcaaaaccgtcgagcagaccggcacaggccagggcccaactgccggtgcataccgcgcccaagcggcgcgattggcgtgcctggctttgcagccacgacacgtgttcacgagtcacggtacgctggatacctacgccaccgcacacgatcacggtgtccagggccggggctttgtgcatggaagcatcgggagtgatttgcagaccgtcgctggcccacacctggtttccgtcgacgctcaaggtcgtccagcgatacagctcgcggccggagagctggttggccatgcgcagcggttcgactgcggaggccagggaaatcagcgtgaaattgtccagcagcaaaaagccgatggattgaggcgcacggttctggggttgggccccggagttgaacgacgtcatcgcggtatctcctcacacaaagcgggtgatggcctcaggcgaggctcttgttattgcgctcttcatccggcgaggagagaggctttgaattgatagagcaaatgccatgcctaaatttgaatggccgtccaataactcctaaaaacgacctcatgacgcgtctaaacaagcccgcgcagcaagtatggttatggctggaattggccgtaggaacatgcccggacaaggtgtgtgagcagatcggtagcacttgtgggaaggcgctttgcgggcgtgggagaagtctgtcacccaacgcgcgggagaccggtggtcaggtcggaaatcgttcgcaagctacttatctatttgcgacgcgctaaaaggtggcgcttttggttggggtgttcactttttgcgcagcggcgcctggatgattgctatcgggggcgagccccctcccacctttgactgtgttcaccaatccaaatgtgggagggggcttgcccccgatgcaggcaacgcggtctcagcactccacggcgctgaccgccaacccaccacgcgaggtctctttgtacttgtcatgcatgtccgccccggtatcgcgcatagtgcggatcacccggtccagggagataaagtgctggccgtcgccgcgcagcgccatttgcgccgcgttgatcgctttcaccgccgcgattgcgttgcgctcgatgcacggcacttgcaccagcccgcccaccgggtcgcaggtcaggcccaggttgtgttccaggccgatctcggcggcgttgcacagttgttccggcgtggcgccgaggatctcggccagcccggcggcggccatggcgcaggcagaaccgacttcaccctggcagccgacttcggcgccggagatcgaggcgttcttcttgcacagaatgcccaccgccgccgcaccgagcaggtagtcgaccacattggcttcggtgacttcctcgctgaacttcatgaagtagtgcagcaccgccgggatgatcccagccgcgccgttggtgggtgcggtgaccatgcgtccaccggcggcgttttcttcgttcaccgccagggcgaacaggttgacccattccatggcactcagggtcgaaccgatcacattcggcttgttcaactcctgcaggctgcggtgcagcttggcggcacgccgacgcacgttgaggccaccgggcaggatgccttcgtgcttgaggccttgctcaacgcaatcctgcatggcacgccagagcttcataaggccgctgcggatttcatcttcagaacgccagaccttctcgttggccatcatcaactcggccacgcgcaggttgtgggtcttgcacagctgcaacagctccaccgcgctggaaaaatcgtaaggcaactcggtgcggtccatgtcggccacgccgctttgcgcctgggcttcatccactacgaaaccgccgcccaccgagtagtaagtgtcgcggtgcagctcgccgttgtcacccgacaccaccagggtcatggcgttgggatggaacggcaggttttcgtcgagcaggcgcatgtccctggcccagacaaagggcaccggcaagcgcccatcgagcagcaaggtgtcggtctcgcgcagggtgtgaatgcgcaggccgatttgcgacggatcgatagcgtcaggccattcgcccatcaggcccatgatggtcgctgtatcgctgccgtggccgatgccggtggccgacagcgagccatacagctgaacttcgacgcgccgcacctgttccaacacttcacgttcacgcaagccttgaacgaacaacgccgcggcgcgcatggggccgacggtgtgagaactcgaaggcccgatgccgatcttgaacaggtcgaaaacactgatagccattgccgtagaactcctcgataagcacgggccaggcttgaacgagctgctacgctcagatcgcccagatggcggcatcatcaagcttttgtttgccgtcacggcgtctcacaccgacgcacccatgctcaccagcgtcgcgtctgtgcgatcaccggttttggccgtttttagcggtgcagatgggcaaaaactgcagttttgccttgggaaaaacctgtaagcgacgtcaccgacactggatacgaccctccctgtactggatacgacgccccctgtaggcgtcagattttcactggtacatgatcagtctcgactcgtttgcaaggcaccgtgccagagctgttgtcgcacgctccaaccgcaacacttataaagcgcggcgaacgccgccagaaaaaacacaggagtctagccccatgaaagcttcaccctcgttgttgttggccgccatgctgagtctgccagtcctggcgcacgctgcagaaccggcacaatgtcagaccgtcaacttctccgatgtcggctggaccgacatcaccgtcaccaccgcgaccaccagcgaaatcctcaagggcctgggctacaagccgcgcaccacgatgatttcggtgccggtgacctacaagtccctggccgacggcaagaacatggacatcttcctcggcaactggatgccgaccatggaaaacgacatcaagccgtaccgtgatgccggcaccgtggagaccgtgcgtgccaacctggagaacgccaagtacaccctggcggtcccggaagcgctgtacaacaaaggcctgaaggacttcgccgatatcgccaaattcaaggatgaactgggcggcaagatctacggcatcgagccgggcaacgacggcaaccgcaccatccagacgctgatcgacaaagacgccttcggcctgaaaaccgccggcttcaaagtcgtcgagtccagcgaagccggcatgctctcccaggtcgaacgcgccaccaagcgcgaccaggccatcgtgttcctcggttgggaaccgcacccgatgaacacccgcttcaagatgaagtacctgaccgggggtgatgattccttcggccccaactacggccaggccaccatctacaccaacacccgcaagggctacacccaggaatgcagcaacgtgggccagttgctgaagaacctggtgttcaccctgaacatggaaagcaccctgatgggtaatgtcctggacgacaagatgaaacccgacgccgcggcgaaagcttggctgaagaagaacccgcaagtactcgacacttggctcgccggcgtcaccaccgttgatggcaaacctggcctggacgccgtgaaagcttacctctccaagtaatgccgctgaccccggggcggtgcgctgccccgggatgttttccctcttcgcatgtggacattcactaccatgctgactgaacagaaaatcccactaggccagtacatcgctgccttcgtcgaatggttgacccaacacggcgccaactacttcgacgcaatcgcatcgaccctggaaacgatgatccacggcgtgacgtttgcgctgacctggttcaatccgctggcattgatcggtctgattgcgctgctggctcactttattcaacgtaaatgggggctgactgtgtttgtcatcgcctccttcctgctgatcctcaacctgggttactggcaggaaaccatggagaccctggcgcaagtgctgttcgccaccctggtctgcgtggtcatcggtgtgccgctgggcattgttgccgcgcacaaaccgttgttctacaccatgatgcggccggtgctcgatctgatgcagaccgtaccgaccttcgtctacctcatccctaccctgaccctcttcgggctgggtgtggtgcctgggctgatttccacggtggtgttcgcgattgccgcgccgatccgcctgacctacctgggtatccgtgatgtaccgcaagagttgatggacgccggcaaggcctttggctgctcgcgccgtcagctgctctcgcgcatcgaactgccccacgccatgccgagcattgccgccggcattacccaatgcatcatgctgtcgctgtcgatggtggtgatcgcggccctggtgggcgccgacggcctcggcaaaccggtggtcaacgcactcaacaccgccgacatcgccctgggctttgaagccggcctggcaattgtcttgctggccatcatgctcgaccgcatctgcaaacaacccgacgctaaagtagggggtgatgcatgagcattatccgattcgacaaagtcgacgtgatcttctccaaagacccacgcgaagcgctcaagctgctggaccagggcatgagccgtaacgagatcctgaaaaagaccgggcagattgtcggcgtggaaaaagccagcctggatatcgagaaaggcgaaatctgcgtgctgatgggcctgtcgggttccggcaaatcgagcctgttgcgctgcatcaacggcctcaacaccgtgagccgtggccagctgttcgtggagcatgaaggtcgccagatcgacatcgcatcctgcacccccgccgagctgaaaatgatgcgcaccaagcgcatcgccatggtgttccagaagttcgccctgatgccttggctgacggtgcgcgaaaacatcagcttcggcctggagatgcagggccgcccggagaaagaccgccgcaaactggtggatgagaaactcgagctggtgggtctgacccagtggcgcaacaagaagccggacgaactctccggcggcatgcagcagcgcgtcggcctggcccgagcgctggcgatggacgccgatatcctgctgatggacgaacccttctccgccctcgacccactgatccgccagggcctgcaggacgagttgctggaactgcaacgcaagctgagcaagaccatcgtgttcgtgagccacgacctcgatgaagcgctcaagctgggcagccgtatcgcgatcatgaaagacggcaagatcatccagtacagcgtgccggaagagatcgtgctgaacccggcggacgactatgtgcgtaccttcgtagcccacaccaacccgctgaacgtgctgtgcggccgcagcctgatgcgcaccctggacaactgcaagcgcgtcaacggttcggtatgcctggacccgggcggcgactcgtggctggacctggccgaaggcaacaccatcaagggcgctcgccagaatggcgcggtgatgaacctgcagaactgggcaccggggcaagcggtggaaggcctgggccggctaccgacactggtggactcgaacatcggcatgcgcgacgctttgcagattcgttatcacaccgggaacaagctggtgttgcatgacaacaatcaggtggtggggattctcggagacagtgagctgtaccacgccctgctcggcaagaacctgggctaacactgcacatatcactgtagaaacggggtcaatgtgggagggggcttgcccccgatagcagtggatcagtaataaatatactgactgacatactgcaatcgggggcaagccccctcccacatttaaagcactaccaggcttcagctatagacccggccaaggagttgccgatggctttcaaactgatcgagcacgtcccgggtgatctgttcctgggcgaagcccatcaggtcgtattcctgaggcccgttgtgcaggtacacctcggcacggtagtagcgagtgcgctcttcctcgggcaggtcactcggcgccgacgagtaggcatccaggctcacttcatagacaaacgggttgccctcttccatctcgatgcgtacaccgatgcagcgcttggacttgccgagcaaggtctgcacttccaagccctgatcacgcaacgccgtcgccgcctcttccaacgccggcgtcacatgcttgtccatgaaacgctgcacggtgccttggctcggttgcaggtccagcgccgtcagacgctcgctgaaaccacggcgaccacgctcggccaattgcgcctgctcctgttcgatggccacgtcctggcgcatcgccttgtgcaagccgaacataaagaagatcagcaccaccgagaacggcagccccgccagcaccaccatggtttgcatggcttcgaagttgccggcgaacagcaggccgatggtcaccagggtgatcaccgccgaccagaagatccgcagccagtgcggcgcatcttcgtcaacattgccgcctttgcacgacaggttggccatcatcaccgcaccggaatccgccggggtcaggaacagcacgaagccgacgaagatcgatacgccgatgacgattttcgacgccgggtaatgctccagcagttgatagatggccatcgacggctgttccagtgcggtcttgcccaactccaccgcaccgtggttcagcaccaggtccagcgccgagttaccgaagatcgacaaccacgccagggtaaagcccaacgggatcagcagcacgccggccaccagttcgcgcaccgtgcgaccacgggaaatccgcgcaatgaacatgcccacgaatggcgcccaggaaatccaccacgcccagtagaacagggtccacaggcccatccaacgttcggtcttgtcggcgtcgccttcgtacacgtacaggtcgaaggttttcaggatgatgccgttgaggtagtccccggtgttctgcaccaggccgttgagcaaatgcagggtcgggccgaacaacagcacgaaaatcaacaggccgctgaacagcacgatgttgaggttggacagacgacgaatgccgttctccacgcccgacacggcggcgatggtcgccacggtgctcatcacgatgatcacgatcaacaggttggtgttgctgtgctgcatgccgaacaggttttccaacccggacgacacctgcatcgaaccgatccccaggttcgtcaccaggcccagcagggtcacgaacatgccgaaaccgtctaccgcatggccggccgcgcctttcacccaacgctcgcccaccagcgggtacagcgccgaacgcagggccagcggctggttatgccgatacgcgaagtacgccacggccaggccgaccagggcatagatcgcccagccgtgcaggccccaatgcaggaaggtcagttgcagcgcctggcgggcggcgccattgctggcggctgcgccttcgggcgggttgaagtaatggtccagcggctcggaagcaccgaagtacagcagcgagatgccgatacccgacgagaacagcatgccggcccaggcgccgtagctgaagtccggggtgtcgtccttgctgcccagtttcaacttgccgtaggacgaaaacgccaggcccaccacaaacaccaggtaggcggcgatgaccaccatgtagtaccagccgaagcttttcgatagccacgcctgggcaacaccgagcatgcgcccggcctcctgcggggcgatgatcagaatggcggtcaacaacagaatcagcgcggtggaggtgtagaacacccaaccgttgacccgcaccttttccggtggggtttttataagagaggcagaactcatggcgcagatgctccgggcagtgcgagagagaaacacaaggcaacggttatcccgggacatcgatttttcggcagtcgacggacgggtgttataaagacaccccgaaaattcttgaaccccgccgaagcggtgtacaagccctgatacggcctgtttcaaggatttttgcaggtgtcagatgtcgcggctcccaggtaggaaatatctgtaggcagcgaccatttgtcgcagatcttattctttgttgattgaacgttcaatcaaaacaaaatagactggccatcaagccgacggacgtttatcgcccgccgcaggcctaaggagaggtgctacatgcccaaggtcggtatgcaacccatacgccgccagcaattgatcgaagccacgttgacggccatcgatcaggtcggaatgggagatgccagcattgcgctgatcgcccgtttggccggcgtctcgaacggcatcatcagtcactacttcaaggacaagaacggccttattgcagcgacgatgcgctacttgatgaacgcgctgatcgacaacgtccacgaacgccgacaggcgctcacggacgacagcccacgggcgcacctgcaggtgatcatcgagggcaacttcgacgccagccaggtcaacggaccggcaatgaaaacctggctggccttctgggccaccagcatgcaccacccgtcattgcacaggttgcagcggatcaacgatcaacgtctgtattccaacctgtgctgccagttccgccgagtgctgccgctgccgcacgcacgcaaagcagcccgcggcctggcggccctgatcgacggtttgtggttgcgcggcgccctgtcgggagacgctttcgacacggcgcaggcgcaacggatcgcttacgaatacatggatttccaattggccaagcaggtgagttagagcacacataaaccgctcaacccctgaacgtctgccgctcagtgttgccacaccttcatggcccaccgacggcgggtaacgccaaccacttatgcacttgcgaggactttatggcccgtttcgacctgcaaaaactctacattgacggcggctacagcgacgctggcagcgatgccaccttcgaagccatcaacccggctaacggtgaagttctcgcccaagtgcaacgcgcaacgaaagaagacgttgaacgtgccgtggtcagcgccgaaaaaggccagaaaatctgggccgcgatgaccgccatggagcgttcgcgcatcctgcgtcgtgccgtcgacatcctgcgcgaacgcaacgacgagctggccgccctggaaaccctggacaccggtaaagccttctccgaaaccaagtacgtcgacatcgtcaccggcgccgacgtgctggaatactacgcaggcctggtgccggccatcgaaggcgagcagatcccgctgcgcgacacctcgttcgtctacacccgccgcgagccgctgggcgtggtcgccggtatcggcgcgtggaactacccgatccagatcgccctgtggaaatccgcaccggccctggccgccggtaacgcaatgatcttcaagccaagcgaagtcacctcgctgaccaccctgaaactggccgagatctacaccgaagccggcgttccagcgggcgtgttcaacgtgctgaccggcagcggtcgtgaagtcggcacctggctgaccgagcacccacgcatcgagaaagtctcgttcaccggcggcaccgacaccggcaagaaggtcatggccagcgcttcgagctcctcgctcaaggaagtgaccatggaactgggcggcaagtcgccgctgatcgtgttcgaagacgccgacctggatcgtgccgccgacatcgcgatgatggccaacttctacagctccggccaggtctgcaccaacggcactcgcgtgttcgtacccaagcacctgcaagccgtgttcgaagccaagatcgtcgagcgtgtggcgcgcatccgcgttggcaacccgcaggacgacaccaccaacttcggcccgctggtcagcttcgcccacatggaaagcgtgctgggctacatcgccaaaggtaaggaagaaggcgcacgcgtactgtgcggcggcgaccgcctgaccgacggcgacttcgccaaaggcgcctttgttgccccaaccgtgttcaccgactgcaccgacgagatgaccatcgtccgtgaagaaatcttcggcccagtgatgagcatcctcacttacgagaccgaagaagaagtgatccgtcgcgccaacgacaccgacttcggcctggccgccggcctggtgaccaaggacctgaaccgcgcccaccgcgtgattcaccaattggaagcgggtatctgctggatcaacgcctggggcgaatccgacgcgaagatgccggtcggtggctacaagcaatcgggtgttggccgtgagaacggcatcagctcgctgaacaacttcacccgcatcaaatcggtacaggttgagctgggcgactacgcctcggtgttctaagagccgggatttgtattgcctgtgaggccgccatcgggggcaagccccctcccacactttgatttgcgaatacattcaaaaatgtgggagggggcttgcccccgatgaggcccgacctgaccacacatcaaagagggtgcatccaatgtcccaagaatacgattacatcattgtgggtgccggctccgccggtaacaccctggcgacccgtctgaccgaagacgaaggcgtcaccgtcctgctgctggaagccggcggcccggactaccgtttcgacttccgtacccagatgccagccgccctggcgttcccgctgcaaggccgccgctacaactgggcctacgagaccgatccagagccgcacatggacggccgccgcatggaatgcggtcgcggcaagggcctgggcggttcctcgctgatcaacggcatgtgctacatccgcggcaacgccatggactacgacaattggtcgaagctgccaggcctggaagactggacctacctcgactgcctgccgtatttccgcaaggccgaaacccgcgacatcggccccaacgactggcacggcggcgatggcccggtcagcgtgaccacgcctaaagccggcaacaacccgctgttccacgccatggtcgaagccggcgtgcaggccggttacccgcgtaccgaagacttgaacggctaccagcaggaaggcttcggcccgatggaccgtaccgtcacgccgaacggccgtcgcgccagtaccgcacgcggttacctggacaccgccaagaagcgttcgaccctgaccatcgtcacccatgccctcaccgacaaagtgttgtttgaaggcaagcgtgccgttggcgtgcgttacctgatcggtgccgccgaagagcgtgttgaagcccgcgcccgtaaggaagtgctggtgtgcagcggcgcaattgcttcgccgcaactgctgcaacgctccggtgtcggcccggccaaactgctggaaagcctcgacatcccggtggtccacgacctgccgggcgtcggcgaaaacctgcaggaccaccttgagctgtacctgcaatacgcctgcacccaaccggtgtcgctgtacccgtcgctgctctggtacaaccaaccggccattggtgccgagtggctgttcaacggcaccggcatcggcgccagcaaccagttcgaagcgggcgggtttatccgcacccgtgaagagttcgaatggccgaacatccagtaccacttcctgccggtcgcgattaactacaacggcagcaacggcgtaaaagagcacggcttccaggcacacatgggctccatgcgctcgccaagccgtggccgcgtccagctgaagtcgaagaacccacgggactacccgagcatcctcttcaactacatggccaccgagcaggactggcaggaattccgcgacggcatccgcctgacccgtgaaatcatgcagcagccggcgctggacccctatcgtggccgcgaaatcagcccgggtatcgatgtgcaaaccgatgagcaactggacaagttcatccgtgagcacgccgaaaccgcgttccacccgtcctgctcgtgcaagatgggcaccgacgaaatggcagtagtcgatggcgaaggccgcgtgcatggcatgcagggtctgcgtgtagtcgatgcgtcgatcatgccgatcatcaccaccggcaacctgaacgcgccgacgatcatgatcgccgagaaaatcgccgacaagatccgtggccgccagccattgccgcgcagcaccgccgactactacgtggcaggcgacgcgccggtgcggggcaagccgctgcgtgaagtgggccctaccgcgcagtaacggatacaccgcggtgttcccatcggaggcaagccccctcccacatttttgaccgtgtgaacccgatcaagtgtgggagggggcttgcccccgaagaggcccgaccagtcactgcaaaacccctccttgatcagctactctgtctgcctgcccgcgacgagccgcccacaaggaaggccccatgttcgatcaccacgccacactcaaacagcatttcagtgccctgcgcacccgtgccgaattcttttcgctgcgttatgtacgcgaatccggccaatacctggccgtacgcaagaacgtcgccgaaccgccgcacctgagccacgacgagggcgccatgctcaccgtgcgtctcaacggcgtggaagcctacgccgcgaccaacgatatttccctggccggcctgcaagccgcccttgagcgtgccgaacagcaagcccggcaaatcttgccccacgccctgctcgacctgcgcgagcaacacgtctccagtgacgtcgccgattacctgtcgcccaaccttcaacagcccttcccatccctgagcgattgctaccagttactcggcagcgaatcggcctccgtgccgaaggacgagcgcctggtgagctgggaagtcagcctgggcctgacccacgtcgagcagatctacctgaacaatgccggtgccgagttgcgccaggcccagcgctttgtgttccccggcgtcaacgtcaccgcctacgatggcaatgacagccagacccgcaccctcggcggcagcaacttcggccagcaaggcgggttcgacgtaatcagccgcttcggcctggtcggtgccgcgccacgcatcgccgacgaggccctgcaactgctggccgcgccgaacacgcccagcggcccgcgtgacctgctgctgatgcccgatcagatgatcctgcagatccacgagtccatcggccacccgctggagttggaccgcatcctcggcgacgagcgcaattacgccggcaccagttttgtgaaggccagcgacttcggccacctgcaatatggctccccgctgctgaacgtgaccttcgacccggacattcccgagcagctcgccagctacggccacgacgacgaaggcaccaaagccagcaaacagttcctgatccgtgaggggctgctgctcaaaccgctcggtggcgcgctgtcgcaattccgtgcgggcatgcaaggcgtggccaacagccgggccagcagctggaaccgcgcgcccatcgatcgcatggccaacttgaatatcgaagcgggcgacaagagcctcgcgcaactgatcggcggtatcgaaaacggcatcctgatgtcgactaaccgctcgtggtccatcgacgatgcgcgcaataaattccagttcggctgcgaatggggccaactgatcgaaaatggcgagttgaaaggcgtggtgaaaaaccccaactaccgggccatttccgcgaacttctggcgcaacctcagcgcggtcggcgatgccagtacgttcaaggtgctgggcacgccgaactgcggcaaaggtgaacccaaccaggtgattcgcgtcggccatgcctcgccggcctgcgtattcagcgatgtcgacgtatttgggggagatgcctgatgaacaacttcaaggcactggtggagtggctcaaacaggccatcaccgacaacgaacaattccacctgggctatgcggatgaagcgtccgagttcgtgcgcttcaaccacgccaaggtgcgccaggccggccaggtgcaacaagccagcctcagcctgaaactgatcaacaatggccgccatgccgacctgggcatcaccttgtccggcgcagcggaactggaccgccaacgtttggccgacggcctgcaacaactgcgcgacaccttgccgttgctacccaaggacccgtacctgctgctgaaccacaacgcctggcaaagcaacaacgaacaaacgcgaccgctgccggacctggcccgggtgttggaagacatcagccaggcggctgagggcgttgatttggtcgggttctacgcttccggcccgatcagccgtggctttgccagctcggacggcgcgttcggctggcaccgcgccaacagcttcaacttcgatttcagcctgttccacgccaatggcgaagcggtcaaggccagctacgccgggcacacctgggacagcgccgagttcgccgcgcgcttccagcaagcccgcgagcaattggaattcctcggccgcccgctgcataagctggcacccgggcagtaccgcgcctacctcgccccggcggcgctggaagaaatcatcagtctcatcacctggggtggtttttccgcccaggccatcgccagcaaaggcagctcgctgcaaaagctgtatgccggtgaacaatccctgagcccgctggtgaccgtcgacgaacagatcagcggctccctgagccaggcgttctccaccgaaggctacccgcgcggcgacgtcacgttgatcaacgcgggcaaaggcgcaggccagttgatcaactcgcgcagcgccgccgaatatggcctgagcaccaacggcgccagcagcgacgagtcccccagcgccttgcagatggccgccggcgacctggcccaggccgatatcctcaagcaattgggcaccgggttgtacatcagcaacctgtggtatttgaactactccgacctgccggcggcgcgcctgaccggcatgacacgcttcgccacgttctgggtggaagacggcgaaatcaaggcaccggtcagcaccatgcgctttgatgacagcgtgtacaacctgctgggtacgcagttggaagccctgaccgctgagcgggaactgctgctctcggccagcacgtacagccagcgcaacacggcctccaacctgttgccgggtgccttggtcaaacgcctgaccctcaccctctaaacacagcagttcccctgtgggagggggcttgctcccgatagcggtgtatcagccaagtattcatcagctgacacgctgcaatcgggggcaagccccctcccacattgagttgtgctgagttcagacatctctgtttcgccccttcctacggttaattcttgtcttccccacctgcacgggcagcctgttgtcgcctgcaaaaaacctcgttataagggttagtggcaccccgccaccccacccacgagagcatgaccttgcccgggaagggcaagctggagcgttgacatgaaccatggaagttttgtcatagaaaagctgttcaagcactacaacgttcatgttgagcagctaggaaacgattcggaaaaaaagaccgtcctgatggtcaacggcgcgctgtccaccacgcgctccttcgcccgcaccagcaaatgcctggccgagcatttcaatgtgctgctgttcgacttgccgttctccggttattcccgcgaacacaataccgacctggacctggtcaccaaggatgacgaggtgcatatgctgcgcgccttggtcgagcgcttccaggtcaaccacctggtgtcagcctcctggggtggcatctcaaccctgctgaccctggcccacaacccgccgtccatcgaaagctcggtggtgatggccctggcgcccaacctcaaccaggccatgctcgactatgtggagcgcgtgcgcgtgttgatcgaagcggacgacaagtcggccgttggccacctgcttaacgagaccgtgggcaaatacctctcgccccggctcaagcgcaacaatcaccggcacctgtcgagcatggccaccaccgaataccgccaggcgcgttttcatatccaccaggtgctgggcttgggcgacggcaattacctgccagcactcaagcagattgaaacaccggtgcacttcctcaacggcgcgctcgacgaatacacccccgccgccgaggcgcaattgttcaagcagtacgtggggcgcagcagctttgccgtggccgaacacaccggccacttgcttgacctcgaatccaacgaagcggccaccgcggtacaccgtgaactgctggatttcctggtgggaaaaagcaccccggttggcgcataatcgccgacacatagccagctaacaaaaaggttctctatgcccaatcgcgtcccgctcgatgccaagaccgcccgctggctcccctgggtggtcgcgattgccttcttcatgcagtcgctggacgggacgatcctcaacacggcattgccggccatggcccgggacctcgcggaaaacccgctgcgcatgcaaggggtggtgatcgcctacatgctcaccgtcgccttgctcatcccggcctcaggctggattgccgaccgcttcggcaccaagaaaatcttctttggcgccatcatgctgttcagcattggttcgctgctatgcgccttgtccagcagcctgaccatgctggtcggtgcccgggtaatccagggcctgggcggtgcactgatgctgccggtcgggcgcttggtggtgctgcgcgcatatccgcgttccgaactggtgcgcatcatgggcttcattaccatccccggcctgctcggcccgctgctcggcccgaccatgggtggctggatggtgcaatacctgacctggcactggatcttcctgatcaacctgccggtgggcatggtcggctgttacgccgtgtggaagctgatccccgacctgcgcggcagcgaacgcacacgctttgatggcgtggggtttctattgtttggcgcggcgatggtgttgatcaccatcgccatggaaggcctgggcgaactgcacctgccgcacctgcgggtgatgttgctgctgttcggcgggctggcgtgcctggcggcgtactggctgcgcgccgggcatatcgacaacccgctgttttcaccggtgctgttcaagacccgcacctttgccgtgggtatcctcggcaacctgtttgcacgcttgggcagtggcgcgttgccgttcctggtgccgttgctgttgcaggtcgcgctgggctactcgccgtccgaagcgggtatgagcatgctgcccctggcggcggcggcgatgtttgccaagtcagtcgcgcgtacgctgatcgaacgcctgggctaccgcatcgtgctcaccggcaacaccctggcgctgggcatcatgctggcgagcatgggcctggtcagcgagcacacgccctacccgctgctgttgtgcatgctggcggtactgggggcgatcaattccctgcaatttaccgcgatgaacaccgtcaccctgatcgacctcgacgacgcccaggccagcagcggcaacagtttgctgtcggtggtggcgcagttgtccctcagcctcggcgtggcctgcgccggtgcgctgctcggcgggttcaccgccgaaaccggtaatgatggggtggaaagcgtactcggtgcgttccaactgaccttcctcaccgtgggcatcatggcgatgctggcggcggcgatcttcctgcaattgtcgccaaatgacggcaaacgagtagtcagccgcgagcacgacatcgagcattaacaggcttctcgtctagaacttgcagggaaattcccacgggactggtacactgcgcgacattttgttttgcagagccagtcccgtgactaccatcgccaccgcttttaatactttgcccctgtccgccgccatgctggctaacctcgactcgctgggttatgtcgagatgacgcagatccaggcgcaaagcttgccggtgatcctcaaggggctggacctgattgcccaggccaagaccggcagcggcaagaccgccgccttcggcatcggcctgttgaacccgatcaacccgcgctacttcggctgccaggccctggtcatgtgcccgacccgtgagctggccgaccaggtcgccaaggaaatccgccgcctggcccgtgccgaagacaacatcaaggtactgaccctgtgcggtggtgtgtccctcggcccgcagatcgcttccctggagcacggcgcccacgtcatcgtcggcacgccgggccgcatccagcagcacctgcgcaaaggttcgctggtgctggatggcttgaacacgctgatcctcgatgaagccgaccgcatgctcgacatgggcttctacgacgccatcgaagacatcatcagcaagaccccgccgcgccgccagaccctgctgttctccgccacctacccggtgagcatcaagcagctggcctcgaaattcatgcgcgcgccgcagcaagttaaagccgaagcattccactccgacgaccagatcgagcagcgtttctacgaaatctcgccggaagagcgcatggacgcggtgaccaaggtactggcgcatttccgcccagcgtcttgcgtggcgttctgctttaccaagcagcaagtgcaggaaaccgtggatcacctgacctccaagggcatttccgccgttggcctgcatggcgacctggaacagcgcgaccgcgaccaggtgctggcgatgttcgccaaccgcagcacctcggtgctggtggccactgacgttgcggcccgtggcctggacatcgactcgctggacatggtgatcaacgttgaactggcccgcgattcggagatccacatccaccgcgtcggccgtaccggccgtgccggtgagaccggcatcgccatcagcctggtcgccccgtccgaagcgcatcgcgcccaggccatcgagcaactgcagaagtcgccgctgaactgggaccaactggacaacctcaagccgcaaagcggtggcccattgctgccgcagatgagcaccctgtgcatcgctgccgggcgtaaagacaaggttcgaccgggcgatatcctcggcgcgttgaccggtgaagccggcatcccgggtgcccaggtcggcaagatcgcgatctttgacttccaggccttcgtggccgtggagcgcgggatcgccaagcaggccttgcagcgcttgaacgatggcaagatcaaaggccgttcgctgcgcgttcgaatcctgtaacacgatctccccttcaatggagatccaatgtgggagggggcttgcccccgatagcannnnnnnnnnnnnnnnnnnnnnnnnnnnnnnnntgctatcgggggcaagccccctcccacatttgaatgtattccaactcagaacttgtatgaggacaccgttttgcgctcgaccgaagttgtgatcattggcgccggcgccgcaggcttgatgtgcgcgctgaccgccgccgggcgtgggcgcaaggtgatgttgatcgaccatgcgaacaaggccggcaagaagatcctgatgtccggcggtggccgctgcaacttcaccaatatgtacaccgagccggccaacttcctctcgcacaatgcgcacttttgcaagtccgccctggcccgctacacccagtgggacttcatcgcgctggtggccaagcacggtgtgccctaccacgagaagaaactcggccagctgttctgcgataacaaatccagcgacatcctcggcatgctgctcgatgagtgcattcaggtcggcgtaagcctgcacctggacacctcgatccaggaaattgccaggctggacagcggctatcagttgcagaccaccttgggcgagttgcgctgcgaatccctggtgattgccaccggcggcctgtcgatcccgaccctgggcgcgaccggctttggttaccaggtggccagacaattcggccacgaactgctgccgacccgcgccgggctggtgccgttcaccatcaccgaccagctcaaggacttgtgtggcgagttgtcgggtacgtcggtggattgcctggtcagctgcaacggccagagctttcgcgagaacatcctctttacccatcgtggcctcagcgggccggcgattttgcagatttcttcttactgggaatccggcgacacggttgaaatcaacctgctgcccgaccacgacgcccacacctggctgcaacagcaacaagccgagcgccccaacagcgaattgaaaaccctgctgggcgagatctttaccaagaagatggccaacctgctggccgagacgtggttcgcatccaagccgatgaagcagtacacccatgccgaaattgccgacatcgcacaaaaactcggcaattggcagttggtgccggcgggcaccgagggttatcgcacggccgaagtcacgctggggggcgtggacacgcgggaagtgtcgtccaagactatggaatcactgaaaagccctggcctgtactttatcggtgaagtgctggatgtaaccggtcacctgggcgggttcaacttccagtgggcgtgggcttcgggctatgcggccgcgcagtacgcctgaccgcaaaatgtactgagtaccaatgtgggagggggcttgcccccgatggcggtgcatcagtcaacgattgggtgactgacccactgctatcgggggcaagccccctcccacatggaataaattttcctgcccgatgtgatcaccacccttgccgtggcgtccttgatagctcaatttagcggcatcgtcccggaagactccagacttcatgtcatcgacctcgttcaagcagtccctgcggcgcctgtgggcactggataaattcagctacagcattcgggtattcatcgccctcaccggcagcatggcgctgtgctggtaccaggatgaaatgacactgctgatcccgctgttcctggggatcatcgccagcgccctggccgagaccgatgacagttggcaaggccgcctcaacgccctggcggtgacgctggtgtgtttcagcatcgccgcgctgtcggtggagttgctgttcccttatcccttgatcttcgcggtctccctggccctggccaccttctgcctgaccatgctcggtgccttgggcgagcgctatggcgcgatagcctcagcgacgctgatcctgtcggtatacaccatgatcggcgtggaccagcgcggcggcgccgtcagcgatttctggcacgagccgctgctgttggtggccggtgccgcctggtatggcgcgctgtcggtgctgtggcaggcgctgttttccaaccagccggtgcaacagagcctggcgcggctgttccgtgaactgggacggtacctcaagctcaaatcatcgttgttcgagccgatccgccagctggacgtggaagcgcggcgcctggaactggcccagcaaaatggtcgagtggtggcggcgctcaatgccgcgaaggaaatcatcctgcatcgcgtgggtaatggtcgccccggttcgaaagtcagtcgctacctgaagctgtatttcctggcccaggacatccacgaacgtgccagctcgtcgcactacccgtacaacgccctagccgaggccttcttccacagcgacgtgctgttccgctgccagcgcctgttgcgccagcaaggcaaggcctgccagaccctggccgagtcgatccagatgcgccagccgttcatctatgacgacagcttcgccgaagccctgggcgacctcaacgcgtccttggagcacctgcgcatccagagcaacccggcctggcgcggcctgctgcgctcgttgcgcgccctggcggccaacctgtcgaccctggaccgcctgctcggcgacgccagcaaccccgacagcctggcggacgccaccgacagcaacctgctggaccgcgccccgcgcaacctcaaggaaatgtggacgcgcctgcgcacgcagatgacgccgacgtcgctgctgttccgccatgcgttgcgtctgtcgctggcgttgaccgtcggctacggcatgctgcatgcaatccacgcgtcccaaggctactggatcatcctcaccacgctgttcgtgtgccagccgaactatggcgccacgcggcgcaagctcggccaacgcatcatcggcacggccatcggcttgaccgtggcctgggcactgttcgacctgttcccgagccccctggtgcaatcgatgttcgccatcgccgccggcctggtgttctttatcaaccgcaccacccgctacaccctggccaccgccgcgatcacgctgatggtgttgttctgcttcaaccaggtcggcgatggctacgggctgttcctgccacgtctgttcgataccttgctcggcagcctgatcgccggcctggcggtgttcctgttcctgccggactggcaaggccgccgcttgaacaaagtgctggccaacaccctgacctgcaacagcatctacctgcgccagatcatgcagcagtacgccgccggcaagagtgacgacctggcctaccgcctggcgcggcgcaacgcgcacaacgccgatgcggcgctgtccaccaccctggcgaatatgctgatggagccggggcatttccgtaaggaagcggatgtgggctttcgtttcctggtgttgtcgcacaccttgctcagttatttgtcaggactgggcgcgcatcgcgaaacccaattgccggccgaagtgcgtgaacatctgatcgatggcgccggcaagaccctggcggcgagcatcgatgaaatcgccacggggttggccaataagcagccgatcgcgatccagagcgatgccgaggaagcgctggcggcggacctggaacagatgccggatgagatcgatgaagggcagcggttggtgcagacgcagttggcgttgatttgccggcagctggggccgttgcgcacgttggcggcgcatctgatcaaggacaccagcgcggcttaggtcgctatcgggggcaagccccctcccacagttttgatttgtgaacacagtcaacaggtgggagggggcttgcccccgatgaggtccgcacaggcactacatgccatgggccttcatcagccgctcatagctgccgtcggccttcatcttggcaatctcccgatcaaagctggccacgatctgctcatgatcagggttcttcaggctgaccaggatgtgcaggctgttttcactcagcggctggggcaaaaactccaccgcattgcgcacccgtgccgattcacgcgagaggtaatagcgcgccacgtactcatcctccaccgtcaaccgcacccgctgcgccgcgagcatacgcacggccatggcgaagttgtgcaccgggactttctgcaactgcgcatccccatcgaacgccgccgaataggcatagccacgcaccacggcgatgggatagtcgtgcaattgcgcaaggttctggaattcgatgggatcgtcgcggcgcttgataaagcgcacacggttgagcaggtattcacctgagaattggcccagtttcgtacgggcatcgtcgtaccaggcgttgatcagcacgtcataacggccgtcgcccacccccatcagcgcacgggcccagggcacctgctcgaagtcactggcgtaacccgcacgggccagggcggtactgacgatgtcggtggccagcccgccattgatcaaggtggcatcggtaaagggcggccaggcatctgccaccagacgcagacgctgcgcgaatgccggctgggccagcagcaacactccaatcaaagcaacggcacgagagaatcgcggcatgctcaaagtccttggcaggcaggcggtggccttggctcaggcgcggcccgaggttctaacagtagctcagattacacaaagaaaccggtgccgaacgcactcaatgatggcaaattgatttcactcacaaaaatagttgatttagacagcgttgcccgctgcgcttactatccgcaacagacattgataagagaactcgccatgaccgttgaatgggtgtgcaaacaccacgatgacctgggcaaggagcagctttacgcgatcctgcgcttgcgcaacgaggtgtttgttgtcgagcagaaatgtgtgtaccaggatctcgatgggcaggatttgtcaggcgacacccatcacctgatggcgtggcaggacgaccaactggtggcttacctgcgcctgctggacccggaatcccagggcggcgacgtggtgatcggccgcgtgatcgtagcgccggtggcgcgcggcaccgggctggggcatcggatgatggaagagacgctcaagcagattgccgatatctggcctgagacaccgatgttcctgtcagcccaggcgcatttgcaggggtattacgggcggtatgggtttgtggtggcgggtgaggaataccttgaggatgatattccacacatcggcatgcgaaaggatcaggggtagcccagcacctgcttgatctggccgaggttcgcctcgatccaacgccgatcaatcgcgccccagctgcgaatccgatagtgcccggcatggttgcgggcaccgtcttcctgctcgaactcacacacaatatccagatcggacaatgccgcaatcgtgtcctgcgccgtgcgccggggcatgccggtggcgtcggtcagggccgggacgctgctggcctggccgctgtcgatcaggtaggccacgtacaggcggcggtagaagctgctcttggtcttgctcacatccatggtcggttgccttgtgcggtcagggtttgcccagcaggtcgcggtacgtgaggtacacccgcaggttgaattccacctgatggtagcccggcatcatgtactcgcagagtttgtagaacgccttgttgtggtccgattccttgaagtgcgccagttcgtggaccacgatcatgcgcaggaactgcggcgcggcctccttgaacagcgcagcaatgcggatctctttcttcgacttcagattgccgccctgcacccgcgagatggtggtgtgcaggccgagggcgcgatgagtcaggtccaggcgattatcgaacagcaccttgtcgatggccggcgcattgcgcaggtgttcctgcttcaaggccagcgcgtaggcgtacagggccttgtcgctctgcaccgcgtggcgttcggggtaacgttgctccaagtaggcacccaactgatccttggcgatcagctggcgcacttgctcctggagggcggcgggataggcctggaggtatttcagcgcggtcatgggctctgcaacagggttcggatggccgccagtgtagcgaattcagcgcaggcgagcgtggcaccagtgtgccacttcctcagccatcaacggctgcgccgccatcgggccctgaatgaatgggcaaccattggccttgagccattgggcctgctcctgggtttccaccccctcggccactaccactacatcaaaatgcttgcacaactcgataatgctgcgcgccatcacctcatcgcgcaccgagcccggcaggcgagcgaccaattgcgggtcaagcttgagggtatcgaaggccaggtcgcgcagatgcgccagggaacaattgcccaagccaaagtcatccagggcagtgcgcacgccgatctggcgcagcaacttgagctgcttgaccgactcatcaaggttgctcatcaggcagtcttcactgatttccacctccagttgccgcccctgcagcccatgtcgctcaagcacctgctgcagttggctcgccaggttgggcatgttgaactggttgctgctcaggctcacgctgagcaccagttcatcgtcgaagccggcgtgccaggcctggagttgggcgccgacttgttggtaaatccaggtgctgagctggctgatcagccgggcttcttccagcaatggcagaaacagaccgggcggcacatcgccgacactcgggtgctgccagcgcaatagcgcttccacaccgcgcacacgcccgtccgccaacgccacctgcggctggtacaccagggtgaactccttgttttgaatcgccgtgcgcacgctgtcttccagcatcaggcgcgaacgggcgcggccattcatttcctggtcgtaatagcgatattgctgacggcctgcgcgcttggcttcgtacatggcgatgtctgccgcgcgcaacagaccgttaatgtccgagccgcaatccgggaaggtggcgataccgatactgacaccgagcatcacatccaaaccttcaacttgctggcagatagacacccgttcgatcagtttttctgcaattttcgccgcctgctcggggaactccagctccagcaacgcggtgaactcatcgccgcccatgcgccccagaatgtcataggaacgcaggcagccctgcaactgctccgatacccagcgcagcacacggtcgccggcgtcatggccaagggaatcattgacccgcttgaagccgtcaaggtccaggtacagcagcaccagagactgctcgttgcgctcgctgcgcagcaaaatgttttcagccgcctggtaaaacccgcgccggttcaacagtccggtcagcgggtcggtgaccgcctggaactccaattgttgatgcaggtgacgcacttcggacatgtccagcacggtcaccaccatggccttctgttcggccggcagcggcgcgcacgacaacgccaccggcacctgctggccgcggctggtccgcaggatcgcatcgtgcaagcgccaggtctggccctggcggtaagcgaggaacatctcgaaccccagccaggccggtacatggggcttttgcaggaagctcaggaaactctcgcctcgcaactcggccagggtagcgttcaacagccgcgaaatggccgggttggcatactcgatcacgctgccctcgcccaccaccaggatgccttcggcggcgttgtccaacaccgaggcattgaacgcccgcgccgactccagctcatggctcaggcgctgcaaggcccggcgattgcgctgatgttccagcaacgcctggaccttgggtttgaggatgtgcgggtcgaacggtttgaacaggtagtcgatggcgccactggcatagccttcgagtactgcggccggcgactgggcgtgggccgtgaggaaaatgatcggtgtcatgcgcgtgcgctggctgccgcgcatcaggcgcgccacctcaaagccgtccatgccgggcatcttcacgtccagcagcaccaggtcgacttcatgtttgagtaacaactcgagggcttccacaccggacgcggcggtcaccacatgccagtcttcacgctgtaacagcgcacgcatgctaagcaggttctccgggtagtcatcgaccacaagcagaaccgaatgaccatcgccgtggtgtggagcgcattccatgctacgtctcttccttaggactactccggtcatttctgacagaaaacccggacaaacactgaggcctcactctagccccggttcagaaaaagcagaagtaacctcagtgccatcattgcgccaatcttcaggaagccgactaacggtcaaccgctacaagccacgaaccatgggaaacatggctttttggcattcctttggcgccaataaatcgccagcaatgatttaacaagatggttaacaccacctataaagaacctgtctggcccaagggccatagcctacacccctctgtaaaaaggcctacgccatgatcgacctatccacctggaacctcagcatccctgtcggctctccgcccgcgaccatcgaaaccccaagattgatgagcggcttcaacgaccaatatttccaggccgaaggcagcaacgtccaattctggaccccggtcaccggcacccgtaccgagaacgccatttacccgcgcagcgaactgcgcgagacctacgccgatgggcgcctgcgcaactggacctatccggatgcggacaacttcctgcgtgccaccctgtccgtcaaccaagtgccgtcctccggcaaaatcgtgatcgggcagatccacgcctatgacagccagaaaccgctgatcaagctggaatatcagttcaaggaaaagacccagaccggcaacatcgtcgccaaagtacgcatgcgcccggatgaggatgaagggcgcacgatcatcgtcgcctccaatgtgccgctggagaagagctttacctatgtgatcaacctcaacaaagccgggctgctcagtgtgtatgccgcggatggcgagtggaacgaacgcatcggcgcggcgtggggcgccaagccgttgtacttcaaggccggggcgtatgtgcaggacaacagtggcaacagcaaggaaggggcgcgggtgacgtttgccaaattagatattgatcacgagtaaggttatttcaatcatcccccgctacggcgggggaatgattacttggatataacgaactccgaagatcgtcttaccgctatagcaaaacagcataaaaattactatttcttgcagtgtgcctattagggcatacctcataaaatcatgtgcgtccaactcatgaaccgttcaggagttaaacacatgccaacgctagccaccattaaccaacctgccgtctcggggttcggcaccgggtcgcaaccaaaaatatacaatgccaccccaccgggttcttttgcgacgccgccccaaaacatgccagttgtcaccaggcccttcagatatctggtcttgtcgcacttattgagcaacaacaccaggattggcgatgtgctgacttattattgctaccctgtgccgtccgcaggtcttcctaccatgcttctggaacaaataacgcttaccgccgcgctgctacaatcttatatcaacaataaacgcgaacattttgagaaggaaatacaatgctaccttccaaacccaggaacctatgacgtttactgggagcttgaaaatgcatctcaaacatatacggagataggacagaatctgagatttacagtggtataactatagtaagcacaaagttggcttatttaatacctgaaaaactactgcgttacccacaatgaaaactactcactgtccttaggcaactactttacacctataaaaaacccgcatttctgcgggtttttttggcgctattggcttagttcaccttagcgttcaactcacctttcaaataccgctggtacatcgcttccaacgagattggcttgatcttcgaagcattgccggcagtaccgaacgcctcataacgcgcaatacacacatcacgcatcgcggtcacggtggcgccgaagaatttacgcgggtcgaattcgctcgggttggtggccatcaggcgacgcatcgcaccggtggacgccaggcgcaggtcggtgtcgatgttgaccttgcgcacgccgtacttgatgccttcgacgatttcttcaaccggcacgccgtaggtttctttgatgtcgccgccgtactggttgatgatcgccagccactcttgcgggaccgaggaagaaccgtgcatcaccaagtgggtattggggatgcgcttgtggatttccttgatgcggtcgatggccagcacgtcgccggtaggtggcttggtgaacttgtaggcgccgtggctggtaccgatggcgatggccagggcgtcgacttgggtctttttcacgaagtcggcggcttcttccgggtcggtcagcatctggctgtgatccagcacgccttcggcaccgatgccgtcttcttcgccggccatgccggtttccagggaacccaggcagcccagctcgccttcaaccgaaacaccacaggcgtgggccatggctacggtttgctgggtgacgcgtacgttgtactcgtagtcggtcggggtcttgccgtcttcgccgagggagccgtccatcatcaccgagctgaagcccagttggatggaacgctggcacacgtcagggctggtgccgtggtcctggtgcatgcacaccgggatgtgcggaaattcttcgattgcggcgaggatcaagtgacgcaggaacggcgcaccggcgtatttgcgggcaccggccgaagcctggacgatcacgggggagtcggtcttgtcagcggcttccatgatggcgcgcatctgctcaaggttgttgacgttaaaggctgggacgccgtagccgaactcggctgcgtggtccagcatttgacgcatgctgataagtgccattgtgttgtctctcccggtcgagggtcgttaatcgtgcaagcctgccgtagcggcggctgctattcaagttattgcagaccaggctttacacacctggcttgctgaatcgttattgctgtcaggcttactgcgctttgcagccacgcccgatcaaatcatcggtggcgacccagtaaaccaggccttcctcaccttttgtgtgaaacgccaattggccgtcgctgtacagcacgcccgaggcggcaacgtcctgcttgaggcggtaaacctggtcggaaccgcccaaacggacatccacctcggatttggcctgattagcaaagcgccagttcacctcagccttgctgtcgcaggtccacgtggtccacttgtcggcagtttctgccttgttgctgaacatgttcatgctgctgcagccggccaacagggccagggctgccagggcgaaaacgcctttcattgccaatcctcgtgaggcgaccgacggccgccagttgatcagacccatcaagggcaaccctgttcctgaccgttgggcgcggcgtcgtatttctccagccgttcgttgccgatgcgcttgttgatcaccggcatggtctcggcttgccagtcggcctggtagcagctctttttctgcccgggggcaggttcatctgccgcagacttcgcgttcggcgtgctgccgcaaccggccaacaggcccgctgcgatcaccaatgccaacgacttgatcatgggaatactccttttccggatcacgagcctcagcctttggctcgggtttccagcacttcaacggctggcagtaccttgccttcgacgaactcgaggaacgcaccgccaccggtagaaatgtaggagatctggtcagcaacgccatatttatcgatagccgccagggtgtcgccgccgccagcgatggagaaggccgagctttcagcgatggccttggccagcactttggtgccgttgccgaactggtcgaattcgaacacgccgaccgggccgttccacaggatggtctgggaggctttcagcagctcagcaaagttggccgcagtttgcgggccgatatccaggatcatgtcgtcggcagccacgtcagcgatcagcttgacagtggcttcggcgctttcggcgaactccttggcaacgacgacatcaaccggcagcggcacgctgactttggcagcgatggcacgagcagtgtcgagcaggtccggctcgtacagggacttgcccaccgggtgaccggcagccgccaggaaggtgttggcaatgccgccgccgacgatcagctggttgcagatctggctcaggctgttaagcacgtccagcttggtcgacaccttggagccagccacgatggcagccatcggttgcgccggcgcgcccagggccttgcccagtgcgtccagttcagcggccagcagtgggccggcagccgcgaccttggcgaacttggccacgccgtgggtcgaaccctcagcacggtgagcggtgccaaatgcgtccatcacgaacacgtcgcacagcgccgcatattgctgggccagttcgtcgctgttctttttctcgcccttgttgaagcgtacgttttcgaacaacacgatgtcgccagctttgacgtccacaccgcccaggtagtcagccaccagcggcacgtcgcggcccagggccttgctcaggtaatcggcgacaggcttgaggctgttttcggcagagaactcgccttcggtcgggcgacccaggtgggagcagaccatcacggccgcgcctttttccagggccagcttgatggtcggcagcgaggccaggattcgcgcatcgctggtgacaacaccgtccttgactgggacgttgaggtcttcgcggatcagtacgcgcttaccttgcagatcgaggtcggtcatcttcaacacggtcatgggtcgcagttcctgaattactgttgatgaggttgtttagaggcgatgtgcagataatgttccgcaacatccagcattcggttggcaaaaccccattcgttgtcgaaccaggccaggatgttcaccagcctcgggccggaaacgcgtgtctggctggcatcgacaattgccgaatgcgggtcatggttgaaatcgcaactggcgtggggcagctcggtgtaggccagcaaacctttaagcgggccgctggtggcggcgtcgcgcaggatccggttgacctccgtcgcatcagtgtcactgacggtctgcatggtgatgtccaggcaggacacgttcaccgtcggcacccgtacggctttggcctggattcgcccggcaagttccggcaacagtcgctcgatgccccgggccaggccggtagacaccggaatcaccgattggaacgccgaacgcgtacggcgcaggtcctcgtggtgataggcgtcgattaccggctggtcgttcatcgccgagtgaatcgtggtgatcgacacatagtccaggccgatcgcctgatccagcaggcgcaacaacggcacgctgcagttggtggtacaggaggcgttggacaccagcagttcattgccggtcaggcaatcctggttgataccgtagacgatggtggcgtcgacatctgcctcgctggccatcggctgggaaaacagcacgcgtggcgcgccggcgtcgaggaaacgctggccatcggcacgggtgtggtagacaccggaacattccagcaccaggtcgacgcccaatgccttccagtcgatggcttcgggggtggcacagcgcaacacctgcacgcagctgccattaatgtgcagacaatcgccctcgacccgcacttcgccggggaaccggccgtgggtggagtcaaagcgtgtcaggtattcaatgctggccatgtcggccaggtcgttgatcgcaacaatttcaaacccggccgccgcccctcgctcgaacagagcacgcaagacgcaacgaccaatgcggccgtagccgttgagtgcaactttgtagggacgcggttgaggcatggggttctcgatcaagggtagttcggtgttgaaagcaccatcgccatcgcgggcaagcccgctcccacattnnnnnnnnnnnnnaatgtgggagcgggcttgcccgcgatggcgccagtacagacaacgcagactgacttagtcttccagcagctcttcagcctggcccaggatgttttccagggtgaaaccgaactcttcgaacaacgctggcgccggcgccgactcaccgtaggtggtcatgccgatcacgcggccttccaggcccacgtacttgtaccagtagtcggcgtgagccgcttcgatggcgatacgcgcgctgacctgcaacggcaataccgactgtttgtagccggcgtcctgggcttcgaacacgctggtgcacggcatcgacaccacacgcacgttgcggccttgggcggtcagcttgtcgtacgcctggacggtcaggcccacttcggaaccggtggagatcaggatcagctccggctcgccgatgcagtccttgagcacgtagccgccacggctgatgtcggcgatctgtgcgtcggtacgtacctggtgttgcaggttctgacgcgagaagatcagcgccgaagggccgtccttgcgctcgatggcgtgcttccaggccacggcggactccaccgcgtcggctgggcgccagcaatccaggttcggcgtggtgcgcaggctggtcagttgctcgaccggctggtgcgtcgggccgtcttcgcccaggccgatggagtcgtgggtgtacacgtggatcacgcgcttcttcatcagcgcagccatgcgtacggcgttgcgcgcgtattccatgaacatcaggaaggtcgcgccgtaaggcaccagaccgccgtgcaaggacacgccgttcatgatggcgctcatgccgaactcacggacgccgtagtacatgtagttgccgctggcgtcttcagccgagacacctttgcagcctttccacagggtcaggttggaaccggccaggtcagccgaaccgccgaggatctccggcagcaacgggccgaaggcattcagggtgttctggctggctttacggctggcgatggtctcgcccttggccgcgacttcggcgatgtaggccgaggctttttccgagaagtcggcaggcaggtcaccggccaggcgacgtaccagctcgttggccagctcagggaattcggcggagtaggccgcaaaacgctggtcccactcggcttcggtggccaggcctttttccttggcgctccactcggcgtagatgtcggccgggatttcgaacgggccgtggttccacttcagcgcttcacgggtcagggcgatttccgcgtcacccagtggggcgccgtggcagtcttctttgccctgcttgttcggcgagccaaagccgatggtggttttgcagcagatcagggtcggctgtgcgctcttgcgggcggtgtcgatggcggtcttgatttcttccggatcgtgaccgtcgacgttgcggatcacctgccagttgtaggcttcgaaacgcttcggggtatcgtcggtgaaccagccttcgacttcgccatcgatggagatgccgttgtcgtcgtagaaggcgatcagcttgcccaggcctagggtgccggccagggaagcgacttcgtgggaaataccttccatcatgcagccatcacccaggaatacgtaggtgtggtggtcgacgatgtcgtggccaggacggttgaactgcgcgcccaggactttttcagccagcgcgaagccaacggcgttggccaggccttggcccaggggaccggtggtggtctcgacgcctggggtgtagccgaattccgggtggcccggggtgcgactgtgcagttggcggaagctcttgaggtcgtcgatggtgacgtcgtagccggtcaggtgcagcagcgaatagatcagcatcgagccatggccgttggacagcacgaagcggtcacggtcggcgaacgacgggttgctcgggttgtgtttcaggtagtcacgccaaagtacttcggcgatatccgccatgcccatcggggcaccgggatggccgctgttggctttttgcacggcatccatgctgagggcacgaatggcgttggcacgctcacgacggctgggcatcgctgatctcctgaggtttgaatataaaagaaacggaaaaaaggaccggcattttccctcagccaccgcctgcgggcaatgacagatagtcacttgagggtgtttttcctgtgctttgggcaccaatcgcttgcagaaacctttaaccggttcgtctaaaggttatagcggccgcttataaccgccacttatcgatcaatatcaaaactttttgatattggccttgcgagcctgtcgccccatcactagactgctggccttatgaatctacccatgccctcactgcgtgccgacgacggcgatgaactggcagccttgtgcaaggccgctggcgacccgctgcgtctgaacgtgttgcgcgcgctggccaacgattcctttggcgtgctggagctggcgcagatcttcgccatcggtcagtccggcatgagccaccacttgaaggtattggcccaggccgatctggtggcgacccgccgtgaaggcaatgcgattttctatcgtcgcgccctgccccacaccgaactgctgggcggcaagctgcacaccgccctgctcgaagaggtggacaacctgagcctgccgcttgatgtgcaatcgcgcatcggccaggtccacgggcagcgcgccgctgccagccaggactttttcgcacgggtggcagagaagtttcgtgcccagcaggacctgatcgcaggcctggctcaataccgcgacagcgtactggcgctgctggacaagctgagcttcagtgacgaggccacggcgctggaagtcggcccgggcgatggcggtttcctgccggaactggcgcggcgctttcaccaggtcacggcgctggacaacagcccggcgatgctcgacctggcacgccagctctgcgagcgcgagtcgctgggcaatgtccgcctgcaactggccgacgcactgagcagcacgacaatcaaggccgactgcgtggtgctgaatatggtcttgcaccatttcgccgcccccgccgaggccctgaagcaaatggccgggctgctgcaccccggcggtagcctgctggttacggatttatgcagccacaaccagaattgggccagggaggcctgcggtgatctctggttgggttttgaacaggatgatctggcccgttgggccaccgctgcgggactcgttcccggggatagcctctatgtaggtttacgcaatggtttccagatccaggtccgccattttcagcggccggctggcgacactcaccatcggtaaatatcaggaaaacatcgagatgagcgaatactcccttttcacctccgagtccgtgtctgaagggcatccggacaaaatcgccgaccagatttctgatgcggtgctggacgccatcattgctgaagacaagttcgcccgtgtggcgtgcgagactctggtgaaaaccggcgtagcgatcatcgcgggcgaagtgactaccaccgcctgggttgacctggagcagatcgttcgtgacgtgatcaccgacatcggctacaccagctccgacgtcggcttcgacggcgcgacctgcggcgtgatgaacatcatcggcaagcagtccccggacatcaaccagggtgtcgaccgcgccaagccagaagatcaaggcgccggcgaccaaggcctgatgttcggctacgccagcaacgaaaccgacgtgctgatgccagcaccgatcaccttctcgcaccagcttgtgcagcgtcaggcagaagcccgcaaatccggcctgctgccgtggctgcgcccggacgccaagtcccaggtgacttgccgttacgaaggcggcaaagtcgtgggtatcgacgcggttgtactgtcgacccagcacaacccggaagtttcctacgccgacctgcgcgaaggcgtcatggagctgatcgtcaagcacgtgctgccggccgagctgctgagcaaggacacccagttccacatcaacccgactggccagttcatcatcggtggcccggtgggcgactgcggccttaccggtcgcaagatcatcgtcgacagctacggcggcatggcccgtcacggcggtggcgcgttctcgggtaaagacccgtccaaggttgaccgctcggcggcctacgctggtcgttacgtggcgaagaatatcgtcgcggccggcctggctgagcgttgcgagatccaggtttcctacgctatcggcgtggcccagcctacgtcgatctcgctgaataccttcggcaccggcaagatcagcgacgacaagatcgtcaagctggtgcgtgagatctttgacctgcgcccttacgcgatcaccaccatgctcgacctgctgcacccgatgtaccaggaaaccgcagcgtacggccactttggtcgtacccctgcgcagaagactgtcggcgacgacaccttcaccaccttcacctgggaaaaaaccgaccgcgccaacgacctgcgtaccgccgccggcctgtaaccgctcaaggtgtacaaaagcctcgccgggtttgcccggcggggctttttattgcaccgcacgttgcgcgacgcccctcacattttttggatccaatgcttgcaggcccaatgatggccctctagaatccgcgccctctcgggcctctcaccttatttggatattgccctgcgccagcccgggagtcccaagcgtgcaggcaatcgaacattgaggtttttcatgcgcatctccacgctcgcccccgccgcccttctgctcagcctgttcgccctgccggcccacgccgccgacctgagcgcactgagcggcgccctgagctcgcagctcggtggcggcaattccggcgactgccagaagcaagccgcagacctgcaaaccaagatcgatgcagccgaagcccagaaggacaccttgaaagtgaaggccttcaaggccgcgcaagaccagatcaacaaaggctgtgacaaactttccgaagcgcaggccaaagccgatgccaagcagcaaacacaggaagccaaggccgataaacctgacgcggtgaaagccctgggcggcctgttcaagtaaacagaaacacccggtaaaaagccccgcactgccggggcttttttgtggccgcagggttccattaggctgggcacccttttcgagcaaggatgctcatgatgcgtctactgatggcccttttactcagtattttaccgttcagcctatgggccgaagattgccccgacgatgctcgggcccaggtcagcaccctggccaaacaaatccgccagtgggatgacagctaccaccggctcggccaatcccctgtgagcgatgaactctacgaccaggcccgcctgcgcctggcccactggcgccagtgcttccccgacacccctttgacgcccgacaacccactggcgagtgcacgcggtacccggctgcatcccgttgcccataccggcctggagaaactgctggatgaacaggcagtcgctgcctggctggccacccgcgaggatgtctggattcaaccgaaggtggacggtgtggcggtgaccctggtgtatcgcaaggggcgcctgagccaagtcatcagccgcggcgatggagcaaagggccacgactggtctgcctccgcgcacaaaatccccggcatagtccagcagttgcccgagcgcatcgacctgctgctgcaaggtgaactctattggcgcctcgatggccatgtgcagtcggccaccggcgggctcaatgcccgtagcaaggtggccgggctgatgaaccgcaaacaattgagcgacaccgacgccgcaggcattggcctgttcgtctgggcttggccgaaagggccggcagcgtttaccgagcgcctggccacactggaacgctggggcttcaccgatagccgacgctacagccaccccattcgagacatcaccgaagccgcgcattggcgcacctattggtacaaccatccattgccgttcgccagcgacggcgtggtgctgcaccaggcgcagcgcgcacccgccgaacgttggcaggtcgttgcgccgtattgggcgactgcatggaagtacccggccgccaaagccctggcactggtgcgcaacgtgcagttcaagatcggccgcaccgggcgcatcacccccatgctggaactggagccggtacgcttggacgaccggaaaatcagccgggtaagtgtcggctcattggcacgctggcaagcgttggacatccgacctggcgaccaggtctccatcagcctcgcgggccaggtgattcctcggttggacgcggtcattctgcgcagtaccaccagggtggacctgccagtgcccaaccctggcaaattccatgcgatgagctgctggcaactggaccccgattgcgaggaacaattactggcacgccttacctggctcagtggcaaccagggcctcgcgttgccacacataggtcgcgagacctggaacgtattgatccaggccggtctaatcgcaggctttctcgattggttaaccctggacgcggcagagcttgctaacattgatggcttcggtgatcgcagccgcgaacgcgtgctcgaaagccttcacagcgctcggcagcggccctttgcacaatggctcaaggccctgggtgtaccgcctgcggcacgtaataacctggagggcgactggcagacgctggtcgccagagacacccaggcctggctgaacattgatggcatcggcccgggccgcgcagcgcaactgagcgctttttttcgcgacccgcacgtacaggccttggctgaatcattacgcatggcggggatagacgggttttgaaccccgctgcccccgccatcagattgcgactttggagccccacatgaaatttctagccccttttgccttgctgaccgtcgcaagcttcatgaccacaccgttgctggccgctgaacaagccgcccccctcaccggctgcgccgccaaacgccaagccatcagcatccagatcgaacaagccaaggcccacggcaacagcgcgcaacaagccggcctggaaaaagccctgagtgaagtcaccgccaactgcaccgacgcctccctgaagaaggagcgtgaaaacaaggtgctcgacgccaagcacgaagtcagccgccgtcaggccgacctcgacaaggccatgaaaaaaggcgacgcggacaagatcaacaagcgtaaggataagctcgccgagtcccgcaaggaactgcaggacgcggtggaagagctcgaccagtaaaaccggtcagtggtcacggaactgtttatggcaggcgctgcaggcatcttcgactttctgcaccgccggccccaggttactggccttgtagggctgcacttggctggcagtcaccaattcgccggtggccgcttcaaggttgcgggccagttgctggaattgcgcctgtttctgccagacatcgtccttggcgctggtgtgatcttcttcgcgcacgcttgggaaatgtttccaaggctcatgggacaaggcgtccagcttgaccgcaccctcggcaaatttggcgccgtcgaacgggatgcgcccacgcaacatgccgcccaggtcttcgccggtcttgagcatctgtttgaagattgccttgcgctggcccagcggcgaattcggatcaacaccgccacaggcggacagggccaggcaggccagcagtacaacagtcagtcgtttaaaagtcatggtggcttcgaggtcacgggaaacggcggccagtatcctcgccccgcccataaagaccaatagccctattaataataagggttgcccaaaggtgttaccgcgcgggcaatcgcttcaggaagtgtttgtatgaatgtaacctttaaaccctggagccgccgcctggcgtgggctctgccgatgatcgcgctgctggccggctgcgacgcgggcaaagaagcagccaaagatgaaactcccaagccccacgccgtcgccacctatgtcagtgcgccgtgggaggcgttgccggcggtgtctgacaacgacctgctggccggttttgaatcctggcgcagcgcctgccagcgcctcaaggcagacccgatctggggcgcgacctgcgcagccgccgctacggtgcccggcaatgccgtggccgtgcgcgggtttctcaaggagcgtctggatgtgttcggcctgcgctcggccgacaacaccccgaacggcttgatcaccggttactacgaaccggtctaccccggcagcctgaccaagaccgccaaggctaacgtaccggtatatggcgtgccggacgacttgatcatcgtcaacctggaaagcatctacccggagctcaagggcaagcgcctgcgcggtcgccttgaaggccgtgtgctcaaaccgtacgacgatgccagcgccatcaacggccagggctctaccgccaaaccgattgcctggctgactgacccgatggacctgcaattcctgcaaatccagggctcaggccggatccaactggccggagggcgccaactgcgcgtcggttatggcgaccagaatggctacccctatcgccctatcggccgctggttggtggagcaaggtcagttgaagaaagaagaggtgaccatgggcgccatcagcgcctgggccaaggccaacccgcagcgcatcccggaactgctggcgagcaaccccagctacgtcttcttcagcgcccgccccgacagtaacgaaggcccgcggggttcactgaacgtgccgttgaccgcaggctacagcgttgcggtggatcgcaaggtgattccgctgggcagcctgttgtggctgtcgactaccaaaccggatggctcacccatcacaaggcccgtcgccgcccaggacaccggcggtgcgatcacgggcgaagtgcgcgcggacctgttctggggcactggtgaggcagcgggagaattggcgggcaacatgaaacagcaggggcagatatggatgttgtggcccaagggcgcagcattgccacaggtgccggatgcacctgccgggacctgaaagcggtctgtccagcttggttcagtggggtgagcggccttgctagtgggcaagcttggcctgttgtggtgagcgggcttgccccgcgttgggnnnnnnnnnnnnnnnnnnnnnnnnnnnnnnnnnnnnnnnnnnnnnnnnnnnnnnnnnnnnnnnnnnnnnnnnnnnnncccaacgcggggcaagcccgctcaccacaacaagcacgctcataacacaaaaagcacgctcaccagcaaagcccacacccacaggggacctgcttcaaccgtcagatcgagacgaagaagaaactcgcaatcaacgccatccccacaaaccacaccagcgaacgcagcatcgcccagtccgccagatagcagatgatgtacagcaggcgactggtgataaacagcacggccagcacattgatggtcaccaattcggccgtaccggccaggtgcgcgataatcacggccgccgcaaacgccggcgtgacttcaaagctgttgagttgcgcactgtgggcccgcttggcaaacccttcgagggtgtccaggaaagcgcgggggtcgtggttctgccgtggtccgaacttgccaccactgaacttggccacgcctgtgcacagataaggcaggaaaattgcgatcaacacacaccagaaggccaccgtcatcactgattccttttttaattttgttttaagttttaaacagaaattagagttttagcactaaacctgtaaaaccgcacccaccgctatgaaccgctgcgctcggaaaggttctatcggtgatttgcccacacgcctgcaacatcgcaccactgttgcggtccatcccccatcgacgctctctccccaacttccaaggaccccggatgctcgaacttgtcgccgcctttatttgccttaccaccctgctcacctacgtgaactttcgctttatcggcctgccacccaccatcggcgtgatggtcacagcgctggtgttttcactgatcctgcaaggcttgagttttctcggctaccccggtcttgaggaacgcatccagcaactgatcggccagatcgacttcggtgatttgctgatgaactggatgctctcgttcctgctgttcgccggcgccttgcacgtcaacctgaacgacctgcgcagctaccgctggcccatcggcctgctggcgacctttggcgtgttaatcgccaccgtggtgatcggcagcctggcgtattacatctttgccttgtttggctggcatgtaagcttcctctactgcctgctgttcggcgcgctgatctcgcccaccgatccgattgcggtactgggtgtactgcgtaccgccaacgcctccaaacccctgaaaaccaccatcgtcggcgagtcgctgttcaatgacggcacggcagtggtggtgtttaccgtattgttgggcatcgcacagctgggcgagacgccaaccgtgggcgctaccgccatgctgtttgcccatgaggccatcggcggcgtggtgttcggtggcctgatcggctacctcgtttacctgatgatcaaaagcatcgagcaacaccagatcgaagtgatgctgaccctggccctggtgatcggaggctcggcaatggccaccgaactgcacgtctcggcaccgatcgcgatggtggtcgccggcctgatcatcggcaacctggggcgcaagctggcgatgaacgacatgacccggcgctatctggacggcttctgggagctgctcgatgacatgctcaacgccctgctgtttgcactgatcggcatggaactgttgctgttgccgttcaactggctgcacgtgttcgccgccagcctgctggccgtcgcgatcctgctgtcgcgcctgctgacagtcgccccagccattctgttgctgcgccgctggcgcacggtgccacgcgggaccatccgcatcctgacctggggtggcttgcgtggcggggtttcagtggcactggccctggccttgccactgggcccggagcgcgatttgctgctgagcatcacctacatcgtggtgctgtcgtcgatcctgctacaggggttgagcatcggcaagctggtcaagcgcgtgacccaggacgagccccaggccacgcctgacactcactgatccttgttgatccgctgcggatgcctggggtccgcagcttttttgctcggcaggctgctttcactgcgaatctgtgcgtgactgatcagtgcaaagataaagctgccgccaatgatattgcccgccagggtcggcccggcgaacaccagccagaagtccttccacggcaactcgccggcaaacaccaggtacgacacttccgccgagccgacgacgatatgggtgaagtcgcccaatgccatgaggtaggtgatcagaatgatgatccacatcttggcactttccatggacgggatcatccacaccatggtggcgatcatccagccggaaacgatgcccttggcgaacatctggccggggtcgttctccatgatcttgcgcccgatctcaaggaacgccatgtcggtcctggtatcgaagatcggcaagtgcagcatcacgtacgccaccagcaaggtgccacacaggttacccaccagcaccaccgaccataaccgcagcaggcgaccggcattgcccagggtgggcttgctcatcaccggcagcacggcggtcagggtgttttcggtgaacaactgctggcgcgcgagaatcaccgcgaggaagcccgcgcagtaaccgaagctggcgatcaccttgaacgcttcgccctccggcagacgggagttgagcaaccccatggccatcagcgacagccccatggtcaagccggccgccagcgccgaccaccacagggcggcaacgctgcgctcaagctcctggtcgccctgggtgcggattatttcatgcagtaccgccgcgcggggcggctggttcttgtccacgtcctgctgctcttcctgcgacaggttgggggtcttgccgtctgtttgagtggccatgatgtaccagagtccgaggggtgcctgtagctacgacacgccacggcgatggctgttcagtggcctgacgactaaaccggtatgcgccaggccttggcggcttccacagtggtagatctgaacggggtgctccagggtttattgcgcgccttgtagtatttgacgatgccttcgagcacgttgttgaacgctggtggtgtcctggcatccgccaagtcacgggccgcacgccgcagcagctcgatattggcctgcggctggccaggccgatagagcgacgggtagatgacttcccgcgtgaagttttcggcctttaccgcaagatcacgcctgctcatctgcgcaaccgcgctcgtcatgactttcgacatcgccgctgtgtcgccaggtgactgcttgctcatcacttgcagaagctgctgaaaattaggcctgccgactgcattgagacgccgccccaaccactcgacatactcgggacgacgcgccagcgcatccagattacgcaacgccgccgccaacctgggagtcaccgtcagcttgtcactggcctgattggcttcggtaatggcggcctccagcgcctgcatcgcttgctgtgcgctcttgcgaaacatcagcacatccttggcggcgggatccttctccagatcactctcaacgctcgccagcattttgtcgtccatggccaacacagcgacgtccaatgagcggaattggtagcgttcacgcaacgcggcacgcgtgtccagatgtgcgctcaccgccgcacgcgccgacgcctgcagatgctttttctgatcgtcggtcatggtgaagttaaccgtgccattgagcaggttacgaaagtcacccttttctgatttcagcggtaacacgacagtctgatccgcttgcgccttgagcttgtcttcctggtacccctcggcagccgcatgcgggacacccatgatcgtatcgaccaggccgctccccacgctacctgccttggcaggctccaggttttcagtttcaaacctgacgaccagtgactcggtcttgcacagggggctttctggaaaaggcggatcaatcaccgcagaagacggcgtattgaccagcagtccaccatccagaaatgccttttgctcagcgtgctcctggaaggcatggccttgctctttcgggcttttgaacaacccaggcaatgagccggatatgtgagccgccctggcaatatccatgtccggggtggtgctggaattgaagaccaccaactgtggtcggccatcgaacagaccggttcccgtgatattgagctgcttgaccgcaggaatgtgacgactcaacacctcaatatcgcgaaaagtcggccctttccctgcactgagccggtccgcaatcttcatgacgtcggcaggccggtcttcccgccgggtcccggcgatctttgccagcagcgacttgcgcgcctcattgccgatcaggtcttccaggggctgcgcttcggtttgcaggcgcggtatcagggtgaacaataattgcgcgatgtttccggccgttcctggcaagcgccctgccaattttccaatttcagtactggcattctgcagctttgcaatcaaaggattcttgctgttcagcaactcaggcaggttgaggccgttcgacaggcgtgcaaaagttttggcatccatgccactggccagcaacacagcagaaattgcgcccgcggatgagccggagatcactttgacgcccaccaacgccttgtggtcttcgagcgcctggaccatgcctgggaacgcaatgcccttggccccgcccccactcaataccagatgtgtgagcggcggcggtgacaaaaccacctccacccggccatcgctggagcgctcaaggctcaccttgcgttcgcctacgcctttgaccagcaatgtctttacatttttttcagcattgtcaggcggctgaggttgagtactggcatgtgggctggacactttcatattcatacgcgccactctctacaggatgtcatcctgagtgacgcgagagcctgggacaggtccatccggaatgatttggtaaagcaaatcgacccggccctcgattactgtggaggagtgtcgtcctcgaactggtccttcacgtacctgatctgagtgcggccatgaggcgctggcaggccatcttcaccaaggttgacgaagaccattttttccacggtgagaatgctgctgcgggtgatcttgttgcgcacttcacaggtcagggtgatggaggtacgaccgaacgcagtggcggtgatgcccagctcgatgatgtcgccctggcgtgaggcgctgacgaagttgatttcggagatgtacttggtcacgacgcgttggttgcccagttggacaatggcgtagatggccgcctcttcatcgatccagcgaagcaggctgccaccgaacagggtgccgttggggttgaggtcttcgggttttacccatttgcgggtgtggaagttcatgttcactccaaagcgtgttgccgaatgatgggcaacatcatggcagaggcccgccccaagctctacgcgccattgcctatcagccccatgagcgatcttcatatggccgacagaaaggcttgggaagtctggcgcacacggctataatcgcccccgcttcaaaacggtcatcttcggttgataccgttctcccgccacctgtccgaggggcgctgcagcaggttcaacctgtcaggctcggatggggcgttgtccggacaggtaccacctggcctgatactaaacgcacaacggcgcccattcgcacactacgaatggaggctcttcatgagcgctgtcaacacgcctgcagatttcaacgactacaaagtcgccgacatgtccctcgctgcctggggccgtcgcgaaacctttatcgccgaatccgaaatgccagccctgatgggtctgcgtcgcaagtacgccgccgagcagccgctcaaaggcgcgaagatcctcggctgcatccacatgactatccagactgccgtgctgatcgaaaccctggttgccctgggtgccgaagtgcgctggtcgtcctgcaacatcttctcgactcaagaccaggccgctgccgcaatcgctgccgccggtatcccggtattcgcctggaaaggcgagaccgaagaagagtacgagtggtgcctggagcaaaccatcctcaaagatggcgcgccttgggatgccaacatgatcctcgacgacggcggcgacctgaccgagctgctgcacaagaagtacccgcagatcctcgatcgcgtccacggcgtgaccgaagaaaccaccaccggcgtacaccgcctgctggacatgctggccaagggcgagctgaaaatcccggccatcaacgtcaacgactcggtgaccaagagcaagaacgacaacaagtacggctgccgtcatagcctgaacgatgccatcaagcgcggcaccgaccacctgctgtcgggcaagcaagccctggtgatcggctacggcgacgtgggcaagggttcgtcccagtccctgcgtcaggaaggcatgatcgtcaaggtttccgaagtcgacccgatctgcgccatgcaagcctgcatggacggttttgaagtggtttcgccgttcatcgacggcgtcaacgacggcaccgccgccagcatcgacaaggccctgctgggcaagatcgacctgatcgtcaccaccaccggtaacgtgaatgtctgcgacgccaacatgctcgccgcgctgaaaaaacgtgctgtggtctgcaacatcggtcacttcgacaatgaaatcgacaccgctttcatgcgcaagaactgggcatgggaagaagtgaagcctcaggtgcacaaggttcaccgcaccggcgcgggcgatttcgacccacagaacgacgactacctgatcctgctggctgaaggccgcctggttaacctgggcaacgctaccggccacccaagccgtatcatggatggctcgttcgccaaccaggttctggcccagatcttcctgttcggccagaagtacgccgacctgtcgccggcccagaaagccgagcgcctgaccgtggaagtactgccgaagaaactcgacgaagaagtggccctggaaatggtccgcggcttcggcggcgtggtgactcaactgaccaagacccaggccgactacatcggcgtgaccgtcgaaggtccgttcaagccgcacgcttaccgttactgataagcctaccacccgccctccttgtgagggcgggctttcaatgtgggagggggcttgcccccgatagcggaatgtcagttaacaaatatgtcgactgatacctcgtcatcgggggcaagccccctcccacattgacggtgtacatctcccggttgtatgagtttcaaagggtattaccatgtcccaagaccgtcgctacagcttcgagtttttcccgaccaagaccgatgctgggcatgaaaaactgatggcgactgccacacagttggccagctacaaccccgacttcttctcctgcacctacggtgccggcggctcgacccgtgatcgcacgatcaacaccgtgttgcagctggaaagccaagtcaaagttcccgccgctccgcatttgtcgtgcgtgggcgacagcaaggccgacctgcgcggcctgctgactcaatacaaggctgccggcatcaagcgcatcgtcgcactgcgtggcgacctgccgtccggcatgggcatggccagcggcgaactgcgctacgccaacgacctggtgagcttcatccgtgaagaaaccggcgaccacttccatatcgaagttgcggcttacccggagatgcatccacaagcgcgcaatttcgaagacgatctgcagaacttcgtgcgcaaggccaacgccggcgccgacagcgcaatcacccagtatttcttcaacgccgacagctacttctacttcgtcgagcgtgtacgagccatgggcgtgaacatccccatcgtgccgggcatcatgccgatcaccaactacagcaagctggcgcgcttctccgacgcctgcggcgccgagatcccacgctgggtgcgcaaacaactggaagcctatggcgacgacgtcaagagcatccaggcgttcggcgaacaggtcatcagcacaatgtgtgaagaattgttgcaaggtggcgcgccagggttgcacttctataccctgaaccaggctgaaccaagccttgcaatctggaacaacctcaagctgccacgctgaaggttgcccggcggtgccaaggccctcgtctacgagggcctttgtcgttttacatgcccacggaacccagcagtccatgaatacagtgcccacgccgtcccgcccacaactggtctacctggtcttcggcgccgagacctaccaccaggaagcggtgttcagcatcgccagtgcgctggctttcctgcaggcaaccccggaagccgccgtggatatccaggtattcagcgacaaccccgagccctatcgcctcttgccggtacgtgtacgcccgctggacgaagctacccgcaaacgctggagcgaaccccacggctatcacttccgtaccaagcatgtggtattgcgccaagtgctggaagaatcgccggtggccatgctgatcgacaccgataccttcttccatcattcaccgatggacctgttcgagcgcgtgcaacccggcaccctgctgtgcaatgccttctacagcaagtacggcgacaaccacgagagcattctctacaccgccttgcgccagcgcctgctggacatgggcgtggccgacgatgaaatgatgacgctcaactccggggtcatgggcctgacgcaacaggatgcgcacatcctcgaccgctccatcgccttgatggacgaattgttcccctatgcccaaggcgcgtacaccctcgaagaattctgcctgtcgatcgccgcctatcgcaccgtcaacgtgcgcgaatgcccggacctgatccaccactactggagtcgcaagcagctgtttcgcgccaaggtcaaggcctggatcgccaagcatgcggccgcgcccaccagcgcactggcgttggccgacactcgcaaggtgtccgcgcacctgccacgccctccccgcctgcagcgtcttctgtacaagctgatcacgctggtgctgcccaagcaccagcagcaattcatccgtgaaattctctacggctgctacgagcatgagaacgagttcgaccaggcgtgtggcccggtttggtgggacaaggcccggcagaacctggaagaacgccagaagcgcccgatcgacactcatcagttggagcactggtttgccaaccccgtggtacgcctgatcctcggcgagcgacgggcagcgatctacgaacacttgatgacctctccgggcaaatagcccggcccgcggatgcgcgtgccagagcttctctttagtgcgggagcgtcgtaacctcagggcatgcccgtcattctgaagttgttgactgccgccctcttcacttgcctgagcctcgccgcttatggcgagaagctgcgcattgtcaccgagccctgggcgccctacgtgtatgaggaccagggcagcatgcgggggctggactatgaaaccacggtgatcgtgttccagcgcctgggcgtggaggtggaatggcagttcctgccctggaagcgctgcctggccatgctcgaccaaggccatgccgatggcgcactggatatctttcacagccatgaacgcgacgccttgctgctgtaccccagcgagccactgtcggaagtggagttcacgctgttctacgccaatgagcgcccccaccccgtgcaaagcctcgaagacctgcgtggcctgaccgtcggcacatcgccgggctatctgtacggcgcagcgttcagcgactcccccctgttcagtcgtgaaccggcaccgagccatgaggccaacttcggcaaattgatgctgggacgcatcgacctggtgatcaccgaccgtcgcgtaggccagcatgtgatcaaggcgctgggcctggaaggcaaggtcagccaggcgccggccgtggtcagccgccaacagcaatttctcgcggtacgccgtagcgcaggcatggacctgctggtacagcgctttgccgccgagctcaaacgcttcaagcaagagccggcctatagcgccttgagtgccaaatatggtggaatccaagccattacggcctccggacgcaccgttgagcagcaggaaagcagcgcacagtgattgctctgttatactccggcctttccgccaggctcacgcccggccgctgaggtcttgaaaaaggcacccaacccgctacagcgcagctttcagcccgcgcgagccggtggagtgcccgccagacgcagcaggaccggacggggttgcgctcccctaagcgccattcacgcccggcaagattatccctttgggccaagccctaactaaaacaggattactcatgtcctttgcttccctcggtctctccgaggctttagtccgcgccatcgaggcagcgggctataccgagcctactccggtgcaacagcgggccattcccgccgtgttgcaaggtcgcgacctgatggttgcggctcagacaggtactggtaaaaccggcggtttcgccctcccgattctggagcggttgttccccaacggtcacccggacaaatcccagcgtcacggcccgcgccaaccgcgcgtactggtcctgaccccaacccgcgaactcgccgcccaggtgcatgacagcttcaagctgtatgcccgcgacctgaagttcgtcagcgcctgcatcttcggcggcgtcggcatgaacccacaggttcaggccatgtcccgcggcgtagacgtgctggtggcctgccccggtcgtttgctcgacctgtgcggccaaggcagcgtcgacttgtcccatgtggaaatcctcgtgctggacgaagccgaccgcatgctcgacatgggcttcgtccatgacgtgaaaaaggtcctcgcccgcctgccggccaaacgtcagaacctgttgttctcggccacgttctcccaggacatcaccgccctggccggcaagctgctgcacaacccggagcgcatcgaagtcacgccgccgaacaccacggtcgagcggatcgagcaacgcgtcttccgcctggccgccagccacaagcgtgcgctgctggctcacctgatcaccgcaggcgcctgggaacaggtgctggtgttcacccgcaccaagcacggcgccaaccgcctggccgagtacctggacaagcacggcctcaccgccgtcgccatccacggcaacaagagccagaacgcgcgcaccaaggccctggccgacttcaaggccggctcggtgcgcatcctggtggccaccgatatcgccgcccgcggcctggatatcgaccaactgccgcacgtggtcaacttcgagctgccgaacgttgatgaagactacgtacaccgtatcggccgtaccggccgtgccggtcgttcgggcgaggccatctccctggtcgcgccggacgaagaaaaactgctgaaaagcatcgagcgcatgaccaagcagaaaatcgccgatggcgacctgatgggcttcgatgccagcgccgtggaggccgagaagccagaagcgcgcgagcgtccggacgtacgcaacccacgcaacccacgcggtccgaagggcgatggcccgaacggcggcgggggtggcggtgggcgtcgcgacaagggcaaagacaagggcaaggaaaaatccgccaccagcggccgtggcgaacgcccagcccgtgagcagaagccccgtgaaggcaccccggcccgcgaacagcgccagccgagccagccgccacgcgccgctgccgaccgtgctccggacgagttcctggatgacgatgtggataacttcggcaaccgcgttgactacgtaccccaggccaagccggcccaaggccgtggccgtcgcccaggtgctccggcacagggtgcgggtgcgggcgctccacgtggcggccagccacagggcggccgtcagaatggccctcgcaacagcagcggcggcaccaccggtacgccgcctgccaagcgcaacggcccgcgcaatggcgcaccccgtgacggtcaggcccgccgtgaagactcgcgcagcaacaaccgccgcccggcccgtgacgaccagccacgcttgtccgaaccagccgtgcagaacccgcgcggtggcccggcgccgaagatcatccacaaggagtcgaaggcagatcgcttcccgacacccgagcagttggatcaactgccaggccgtcctcgtggtgaaaagccagcgctgctgacgcgcaatcgctgagttttatagccccatgaaaaagccccgcatctttcgatgcggggctttttttgtacaggcagaaattacttctgcttgacaccttccagcgagatgtccaggtccacagtctgcgaggacgggcctgggcccttgatgccgaagtcgttcaggttgacggtggtggtggcgttgaagccagcacgctcgccgccccatggatccttgccttcaccgttgaaggtggccttgaaggtcaccggtttggtcacgccgtggaaggtcaggtcgccagtcacatcagcagttttcgcgccagttggcttgactgcggtggacacgaacttggcgtcggcaaacttggcaacgtccaggaagtctttgctggcgatgtgcttgtcacgttctgcgtggttggaccacaggctggcggttttcacgtcgaccgcgattttgctggcctctggcttggcggcatcccagctgaaggtaccgtcccaatccttgaaggtaccgtgaatgtagctgtagcccaggtggctgattttccagtcgatgaaggcgtgctggccttctttgtcgatcttgtagtcagcagccatcacctggcctgcggacagcagggcagtaccgattgccagagcagcgagggtctttttcaacatgctttctattccttgtgagtcgaggttgaacatcaggctttgcgccccagcattcgcgtgagggtcgcatcacgatcgataaagtggtgtttcaacgcagccacgccgtgcaagccggcgaagaccaccagcacccaggccaggtacaggtgcaccaggcccgcgttatctgcctggtccggtagcccggaaaccacggcaggaatctcaaacagaccaaacaccgggataccgacaccgtctgcggtggaaatcaggtaaccggcgatcatcacggcaaacagcccgagataaaggaacgcgtggccaaaggccgcgccgatacgggtcatgcggctgtaactggccaacggtggcggcggcgggctcaccatgcgccagacaatacgtaccagcatgatggcgaacagcgtgatgccaatgctcttgtgcaggtctggcgcgtctttgcgccaggcgctgtagtagtcgagaccgaccatccacaaccccagggcgaacaagccaaacaccaccagggccacgccccagtgcaaaaccatgctgacccaaccatagcgggccggtgaattgcgtagctgcatgtacttaatcccgtaagagctgtgcccaagactagcgatttacctatcgaattaaagcggaaaatttcgctttgaaatatcgagaaatacgatcaagagattatgcacagtacgttaacaatggattaaggactattcctaagaaacgtgacagaccgtcccgcgtttactacgaattcagccgttatgggttgtgacacagccgcccattgcataggcttgcgcgattgtttcacctgcgccggccgcaggaccgcttcgaggagatcaccgatgggcttgaacaaccagtggatgcaacgcgaccttgccgtgctgtggcatccctgcacccagatgaaagaccaccagcaactgccgctgatcccgatcaagcgcggtgaaggcgtctggctggaagacttcgaaggcaagcgctacctcgacgccgtcagctcctggtgggtgaacgtgtttggccacgccaacccgcgcatcaaccagcgtatcaaggaccaggtcgaccaactcgaacacgtgatcctcgccggtttcagccaccagccggtgattgaactgtccgagcgcctggtggcgatgacgcccgagggcctgacccgttgcttctatgccgataacggctcgtcgtgcatcgaagttgcactgaaaatgagcttccactattggctcaaccgcggcctgccgaacaagaagcgcttcgtcaccctcaccaacagctaccacggcgaaaccattgccgcgatgtcggtgggcgacgtcccgctgtttaccgagacctacaaggcgctgttgctcgacaccattaaagtgccaagcccggactgctacctgcgccccgagggcatgagctgggaagaccactcgcgcacgatggcccaagtcatggaacagaccctggccgagcaccacgataccgtcgctgctgtgattatcgaaccgctgatccagggcgccggcggcatgcgcatgtaccactcggtttacctcaagctattgcgcgaagcctgtgaccgttacggcgtgcacctgatccacgacgaaatcgccgtgggcttcggccgtaccgggacgatgttcgcctgcgagcaggccggcatccgcccggacttcctgtgcctgtccaaggcgctcaccggcggttacctgccgttggccgccgtggtcaccaccgaagatgtctacagcgccttctacgacgactaccccaccttgcgcgccttcctgcattcccacagctacaccggcaacccgctggcgtgtgcggcggcactggcgacgctggatatctttgaagaagacaacgtcatcgagaacaacaaggccctggcccagcgcatggccactgccactgcacacctggtggaccatccacatgtctcggaagtgcgccagaccggcatggtgctggccatcgagatggtccaggacaaagccaccaagaccgcctacccgtggcaggagcgccgtggcttgaaagtgttcgagcatgccctggaacgtggcgcgctgttgcgaccgctgggcagtgtggtgtatttcctgccgccctatgtgattaccccggagcagatcgacttcctcgccgaagtcgccagcgaaggcatcgatatcgccaccaacagcaaggtcagcgtggcggtgccaaaagatttccacccaggcttccgtgatccgggctgattgcccgcactccttttccagagaacagaaatgagactgtcccgctttttcaccgacaccccgctgagcatcggcgatcacgaactgcccgaagcccaggcgcactacatcagccgcgtgctgcgcatgggcgaaggcgatgccgtgcaattgttcgacggttccggccaggagttcctgggcacactgctggaggtcggcaagaagcgcgtcaccgtgcaactgacggaaaacttcgcaggccaggccgaatccccgctgcacatccatctcggccagggcctgtcccggggcgagcgtatggactgggcgatccagaaagccaccgaactgggcgtcaacgccatcacaccgattttcagcgagcgctgcgaagtgcgcctcaaggacgaacgcgccgacaaacgcctgctgcactggcgccaggtggcgatcagcgcctgtgaacaatgcgggcgttcgacggtgccggtgatccacccaccgctgttgctggcggactggttgaagcagaccgaggcggatttgaagctggtgctgcacccggtggccgagccgatggtcagccatgccaagcctgccagcctggcgtttctgatcggccccgagggcgggctgaccgaccacgaagtcgaaaccgcccagggtgccggctaccacgccgcccgcctcggcccgcgggtgttgcgtaccgagacggcgccggtggtagcgctggccgtcgcccaacagctgtggggcgacttctagggtttactccaccggatcgctgatcggtttggcgatgatcgccttcaactcagtggtcatcgggaattccaggttcaagcccttgggcggaatcggctgttcaaaccagcgctggtaaatcccgttgatctctccgctgcggtacaggtctgcgagtgtctcgttgaccaccgccaggaactgcgggtcgtccttgcgcaccatgcagctgtagatttcccgcgattgctcctcgcccaccaccacccagttgtgcgggtccttggccttggcgcgttcgccgtagagcaacgcgtcgtccatgtagaacgccgtcgcgcggccggtctcaagcatcttgaaggcttcgccgtggtccttggcgctgatcacgaacatattggccttgtgctcggcgttgtagcgcttgaggaaacgttcgttggtggtgccggccgtggtcaccacgttcttgcctgcaaggtcggcgaaaccctggatgccgctgtcttttgccgtgagcaactgccccttcacatagataaacccgtaggaaaaccccacctgtttctgccgctcggcggtcaccccggtggagccgcattccaggtcgacggtgccgttctgcaccagcgggatacgggtctgggacgtcaccaggttgtacttcacgttgagcttggccaccccggttttgtgctggatgcgctcgacgatcttgttcgccagctccactgaatagcccatgggcttgccactgttatcgcccacgtaggaaaacggcaccgacgcatcgcgatagcccaaggtgatggacttggcgttggcaatcttgcccagcgtgccgtccagcggcgtttgattggcatgggcctgcgcgcccagcaaaagccccagggtgcagccggtcaacaggatctttttcattgttattctccgttggttttcgggttgtgagtcttcacgcagcgcggggcgtaaggccccgcatatcaatggagggcgtttgctggccgatcaattcagccagtaactggccgctgccacaggccagggtgaagccgagtgcgccgtggcccaggttcagccacaggttgcggtagacgcctgcgccgatcagcggcacaccggtcggagtggccgggcgcatgccggcccattccactgcgtgggcgtaatcccctgcaagcggaaacgtctccacggcctggcgtttcatcagcgccaggcgcttgggttcgacgcgggcgtcgaagccgacgatgtccaccatggccgcgacccgcagttgttcgccgatacgcgcgtagaccatcttgcggtcatagtcggtgatgctcacgttcggcgcctggtgccgggcgccaatcggcacgctgaggctgtagcccttgagcgggtacagcggcagcgacacgcccaactcggcgctgcgatacccggccgacagcaccagatgttcgaccggcatcacttcatcaccgacctcgatggcctgcaccgcgccctcggcatggcgaatcccggtgaccttgcgccctaacaagaaggtgcaacgtcccgatgcctccagccgcgccgccaagcgctggcagaaggcatgacaatcagcgacctcttcattcggcgtatagatcccgccgacaaatccaccgcccgccaacgccggttccaggcgcgcgcaatcagcggccgagagcacttgctgttgcaggatatcggtgaccttgctgcgggcatgctcaaaggagccggcattgcgaaaggtcaccagcttgccgttgcgccgccagtcgaaaccgtccaggtggtcgtcctcgcgccactgctgcaaggtgtcctggctcaggcaggccaagcgcagcaggtgcgcggcattgcgcttattcaccgagccacggcaagcgccgaggaacgccgccatccagcgccactgttgggggtcaaggcgcgggcgcagcttcagcggcgagtcaccgcgcagcaaccagccaatggcttgcagcggtacacctttatccgccagtggtgccacgtagcgataggacaattgcccgccgttggcgaagctggtttcactgcccagagtgtcacgcgcatcgatcaccgttacctcatgacctgcgcgcaccaacgcgtaggcgctggccagtccaatcaccccaccgccaataatgcacaccattcccgccgcccgtcgttgaatcaagaagcctccagcctaggggcaggtgacaggccaccgacaatgaataaagatgggctacctataaacaaaggttatggactcgccatgcgcttgcgtcatatcgaaatcttccaggccatccgccagaccggttcggtcagcgccgccgcgcaattgctgcatgtctcgcaaccggcggtgaccaaggtgttgcagcacgccgaattgcagctgggcttcccgctgttcctgcgggtgcgcggcaaattgctgcccaccccggaagcactggcgctggaacgcgaagtggagaaagtcaccgatagcctgcaaggcgtaagacgcttggccaaaagcctgcgccgtgaaccgggccagagtgtgcgcatcggcgcgatcccggcgctggcgctgtcgctgctaccgccggcgattctggagtggaaacgcgattacccggacatagcctgcgagctgtccagcgaccatagtcgcgagctggtgcagaagctgttgatgcgtgagattgatctggcgctgacgctcaatttttccggccatccggggttgaccacgcaggtgctggccaatggcgtgttggtggcattggcgtccaaaggctattggccgccagccgaactgagcaagcccttgccgttggctgacctggcgggcgcaccgctgatcggcctctccagcgccgacccgctggcggcgaagctcgacagctacctggaaaacgtcgacccaccgcccagggtaacgatctcggtgcaaacctattccctggctcgcgccatggtggaatccggggctggtttgacggtgatcgatcccttcaccgcgctgggtgcgtcaacggccaccacctgcatccgccccctcacaccgccgctgccaatcaccctgtacgccctgacccgcgccgacgaaccgccgccgcatatgttggccaatctgctggagatctttggccaccgtgccagggagcttctggagcggctataacacgtaatgcatgatcgccacaaaatgcagcaggctgccgccgatcacaaacaaatgccagatcccatgggaatgccgcaggcgatcctccaaggcaaaaaagatgatgccgacggtgtacaacaccccgcccgaggccagccagataaacccggccgtgcccaatgctgccagcagcggcttgaccgccaccaacacgatccagcccatcaccgcatagatcacgatcgacaggatgcgcgcctcggagcgcggcttgatctcctgcaagatcccgatcaccgccaacccccacacgatcccgaacagcgtccagccccatggcccgcgcagggtcaccaggcaaaacggcgtgtagctgccggcgatcaacaggtagatcgaaaagtgatcgaccttctgcatgatctcctttctgcgaccctgcacgctgtggtacacggtggacgcgctgtacagcaccatcaaggtaaagccatagatcgccacactgacgatcttccaggggctgccgtccaggctcgccaccaccaacatccacacggcgccaatacacgccgcgacagcaccgagcaaatggctccaggcgttgaatcgttccccgtggtacatgtgccgctgacctcctgtaaccgttaggactggctggcaagcgtccagccttgcgcataagagtgcaagcggcttatgacgttccggcgacgccgaagggttttgcgggcacaatcgaccgcattcgaacaagagccacggccatgctgatcgacgaagaattcaccctcaagaaactggaaatcttcctggcgttcatgcgcaccggcaacctggcccgcgccgccgccgaactgcaaaccagcaatgtgagcgtacaccgcgccatccactccctggaaaacgcgctgcgctgcccgctgttcaagcacgaagggcgcaacctcacgccgctggaaagcgcctacgtcctcgaagaacgtgcgcagaaactggtggccgacgtggtcgacagcgtacgcctgacccgcgaagccgccgggttctccgccgaacgcttcaaattgggctcgctgtattcgctgacagtgaagaccgtgccgcagctgatcatgggcctgaagatccgccgcagcgagctcaatatcgacctgatcctgggttccaacttcgacctgctctacaagctcaagaacatggaagtggatgcgatcctcatctcgctggacgagcacgccaacgacccggactgcgagcagattgcgctgttttccgacgacatcttcctcgccaccccggccgactcgcccttcgaccgcgaacagcaaatcgacctcgccgacgtgcgcgacgcaaccttcatcaccctcacccaagggttcgccacgcaccaggatggcaatcgcgtgttcaagcaggcggggttcgagccgaaggtggcgatgcaggtcaatgacatcttcacgctgctgagcatggtcagctcgggcgtgggttatgcgctgctgccgggtaggattgcggcggtgtatgagaaccgcgtgaagctcataccgctgcaacccaggtatcggttgcagcagcatatcggggtggtgttcttgaaggccaaggaaagggacccaaacctgctggcgttgctggcggagtgtcggatgtatgccaaccgccaggtgccagcctgacacaccgctatcgggggcaagccccctcccacacttgaaatgcgttccaaatgtgggagggggcttgcccccgatgaggccctgatagaccccttacccaaccaggccgcgcacaatgaaatacagcagcgaaggcccaagcaggcagcccagcccggtgtggaacgtcgccgtcagcgcgccatacggcaccaaccgccgatccgtcgccgccagccccgccgtcacaccgctgacggtgccggccaacccaccaaacaccatcgccgaacgcgggttgtccaagcccatccagcgcgccgcgaccggcgtaccgaccatgaccaggatcgccttgatcaagccggtggcaatcgacagcgccatcacatccgaggtcgcgccaatcgccgcgccggtcaccgggccgacgatgtaggtcacagcccctgcgccaatggtggtcatgctgatcgcatcgcgataaccaaacacccaggccatgctcgcaccaacgataaacggcaggatcgtgcccagcagcagcgcgatcacgccgatcatcccagccttgcgcgcctcggtggcttgcacttcgaacgccgtggcgacgatggcaaagtcgcgcagcattgccccacccatcaacccgatgccagagaacagcgccaggtccgccaggcctttctggccgccggtgatcgtaccgccgacccaggccaataccaggccgatgacgatggcaatcgccgagccatgaatgcgtccgaaggtcaggcgcttggacagcaccacggaaatccacatcaccacacccacgaaggcaaacgcggtgatcaggccgttgtgttccaggcctttttcgatgagatcccacatatcagcgacctcccactggagcaatcagcggctcttcatcgggcaacggttcgcccttgtgcgtgcggctgatcagggcaatcgtgcaaccacataccactaccgaaccgatcgcggcgagcaccgccaccgggccgccgtgcagggcggtgaccacgttttgttgcgcagccatcgccaccaccacggggatgtacatcgcgccccagaatcccacgcccatttcgcagtccttggtcatgccgccacgcttttgcatccacaggcgggcgcagatcaacaggatcatcgcgatccccaccccgcccacattggatttgacacccagcaacacgccgagcatgtcgcccatgatcacgcccgcaagcgtacagatcgccagtaatgccacaccgtagataatcattgttgttgtcctcaaagtgctcgatcgaaattgttgttgttgtgcttcgaaagccttgggcagtgctttatcggtggcggcggtcctcctcttgcagcaaggcctgcagggtgtccaggcgtgcgccttcacaggcgatcaccgtgccttgctcaaacacccgccgtgacaggccggtgagcactgcgcccggtggcagttcgatttgcaggcgcacgccgcgctcgtaggcgctttgcacggtgccgcgccagtcgacgacgcggcacatgttgaaggccaggtcgtcgcgcaattgctcggggttgtgaatcggccgtgcgcgggtgctgctcaggtaggtgatgcgcggcgccttgagcgtaccgaaggcttgggccagggcctgggccggttggtccaacaatgcgcaatgggatggcacgctgacggcgaggcgtttggcgatgccgttgcctttgatgcggtcggcgacgcgtttcatggcctggtcgctgccggcaatcacagtctggttatcggcattgatattggccagatacaccggggtttcagggctgtggacttcggccaacaggttttcgacggtggataactcggggccgatgatcgcggtcatgccgtagccctgtggataagcgttttgcatcagctcaccgcgcaggctgaccagcttgattgcctcgttgaagtccatcgcgccggcaatcaccgccgccgcgtaggcaccaatggacaggcctgcgacgtagtccggcgtgtgttgcagcaggcgggcgtgggccacgccggcgatcagcaggcaaagttgtacagcgcgggtattggccagggcctcagcagaatccaaggtgcgcacgtcttcacccaaggcatcgctggcttgttccaacacatcggccggcaacgcctggagcatgcccgagcgttgggcgccctgccctgggaacaccagaaggctgctcatgccacggcctgccagggatcaaggaccaaatgcgcaccgttggcggttttcaacagcacccgccgtgatggaccggcccattcgcgcaagacgacggcaccgaaaggcgtttgcagttgcatatccacagcgcacgcggcgttgtccaaggtggccaacaagtcgcgtgcatcgctgcgatccagcggatcgggtgtgcgcagaatcaggtccaggtcgctctgggcatgcagtgcttcaatgcccgttgccaactcaaaaccagcgctacccgtgacgccccaactcaatggcgccagcaccggccgcagttgatcaagggcttgcaatgccggtagatcccttgtcgaaaccacatcgcgcaacgcctccggcgcgacccgccgctgcacggctgccatcggcatcaacgcggcaaaccgctgctcgcgcaaacgcccacgcacacccaccgcgacaaagcccggcgtgacgatggcgcggcgcacgaccaccgtgccaaccgcatccttcgcccacgccggtgcgtcagcgggcaggtgcgccggggtcatgccccagagcaggtcgtgggcgttcaccattgctcccgcagcagttggcgcacatggctggaggcggcgcggttggacgcaccgaggcggctgctcaaatccggcgtgccgacatccttgatcgcactcaccaggcactcgttgacccgcgccacatcttgcgccgtgggctgttcgatctggctgaccgtcaaggtctcccacaacaggccgaggctggcatagctgtcgatgtcataggccatcggcggcacgctggcggccagggcttccagctcttcgacgctgcgcagggtcacccgcgccgccgaggccttgcccatggcgtgcaccatcacaccggggtcgcgcagggcgatcaggcgattggcctggtagccatgggcgaggaacgcgccggacatggctttgcccaccagcagcgcgatcaccgggtgcccggccaatcgggcacgggcatagctgtcggcggcggcagccagcgcctggtggatgccgagggcttcttcgcgccggccataggcctggctgggcacgtcgacaatggcaatgatcgggcgtttgtcgcctcgggcgatggcttcatcgacagccttcgccaaaccccaaccttcgagcaaaccgacttcgccattgcgtgcgcgggggaaacggttttgcgcgtcggtgaccacggcgataaagcgtacggcttgctcgcccagcaggccgtcggccactttcagggagttcggcaaaccctcaacgggcgttgcaccggcgctcaatgcgttgaaccactgcaaacctctcatgagcgttctccttgaaacagcgcgcgtaccgtcgccgggtcgagctgcggcgtagcatccagttcggccaggcgcgccaggtagtattcggattggcggctgcgttgctgggtgggcaggccctgttgcagcaatgcactgacggtctgttgaatctcggccacatcgtccgctacataacggtcggccaagccgctgttgaagcgctgctcgccgccggtgaggctccagatgaagggccggtcgcgggagtcatactcttcaagccccgcttcctgttcgatgacttgcggaccattcaagccaaggcgggcttcgcgggtgacgacaaggtaactgcacaaccccgcggcgatagacatgccgccaaagcaaccgacactgcccgccaccacgccgatcaccggctggtactggcgcaggtcgacaattgccgcatggatatccgcgatggccgccaggcccaggttggcttcctgcaagcgcacgccgccggtttccagcagcaacacagcgcgggttggaatacccttgcgattgtcttcggccgccagctccagagcgccggcgattttcgcgccgcccacctcgccaaggctgccgccctggaagttgccatcgatggcggcaatcaccaccggttttccaccaatgctgcccttggcgatcaccacaccgtcatcggcctggggcactacgccctggcggctcagccacggcgacatgacgcgctggaacgggtcgatcaattcgcggtaggagccggcgtccagcaaggccttggcacgctgccgagcgcccagttcaacgaagctgtgtttggcgagtaaatcagtcatgaccgacctcctcgaaaccctgctccaggcgcaagcgcaccacgccgggggtggcgccaaaatcgtggatatcaatcttcaacgccggcggggtctgctcttggaacatccgctcgaacagatgctgccagcgttgctcggcaccgttcaccgaggtctgcacctggatggtcagggtgcccggagtgcccggctccagcagcacttccaggtcgcccgagccgacgcagcccaccagtgcacggcctttcggtggctgcccggcggggaattcaaaggataaggtttccatcacaacgctccgtcgaggcggtcgataaacaggcaggcggccaacaggtcggcggcgccgccgggggaggcattcagggccagcagttgctggtccagctcatgcagttggcgacgaccggccagggttgcgctgccgccagcgtcgagcaccgcttgggcaccgtgctgcatggcttgaaggccctcggtgccggcgcggtaaagcacgcaagtgtcagccagctcggtcatgatcgcgagcaaggcatccaggcgcgcattctgttcgccggcatgctgcaggcggcttttgcgcagttgcggcaggcctcgttgtaccaccgaggggaagccgagctgcgcttcttcacgagccccgcgtgcgccgtagcgctgggcaacctgggcgccatggctcaggggttgcggagcgaagcggtcgttgagcagggccagttgggcggcggtcagcgtcacggcgcgtggttccagcgcggcggcggcggtgagcaaaccgagggcccagatcgcgccacgatgggtgttcaccccgttggtggtgataagcatcgcttgctcaccttcacggccaatgcgcccgagggcttcgcgcaggggcaagccgatttcaccgatctcaatcgccgcctcggccatttccttgaacatcggccatagcgacagcgccgaggcgtgcatcaggcccaggtgtaaatcgctgtgggcgccgttgccgcgccggtccaccagggcgggcttgggcgacaggtcggcttcatcgatcagcgcatcgacggccatgtcggccagttgatccgcaaggctgagttcatgcagtttgagggcgcgcatttaccagctcctgaatttggcgggcgggttgtacagaccaccggaccagtccaccaggtcagccacgctcttggcggccaacagttcacgagtggcgtcggtgcggcgaatccccaggtcttcaggtaaggcgatcaagccttcgcggcgcatgcgtgcagtgtccttggggttgtggcgcatgccgatggcggtgacgcctgcgacggcggcgatcatcgcctggcgctcttctagggagcgcgccttgtacaggtaggcgataccttcttcggtgagcaggtgggtgacgtcatcgccgtagatcatgatcggcgccaggggcatgccgcttttgcgtgcgacttccacggcgtcgagggtgtcgacgaaagtgggtttgccgccttcctggaaggtctcgaccatttgcaccacgagttttttaccgcgttccaacaaggcttcaggcgcatcgtcgtgacgcatgtccagccacgccggcgtaccatgacggcgaccgcgcgggtcatggcccatgttcggcgcgccaccaaacccggcaaggcggccacgggtcacggtggaggaatggccgtcgccgtcgacctgcagggtggcgccgataaacaagtccaccgcgtattgcccggcgagctggcagaacatgcggttggaacgcatcgagccgtcgcggccggtaaagaacacatccggccgtgcggcgatgtagttctccatgcccagttcggtgccgaagcaatgcacgctttcgacccagccgctttcaatcgcggggatcaacgtggggtgcgggttgagcgtccagttgcggcagatcttgcccttgaggccgagggattcgccgtaggtcggcaggatcaactcgatggcggcggtgttgaatccaatgccgtggttcagcgactgcacattgtgtttttcgtagatgccacggatcgccatcatcgccatcaacacatgcaccggcttgatgtggcgcgggtcgcgggtgaacagcggctcgatgtagaacggcttgtcggccactaccacgaagtccacccaactggcggggatgtcgacgcggggcaagtcggtaacgtcatccaccaactggttgacctgcacgatcacaatgccgtcgctgaacgcggcgggctcgatcagcgccggggtgtcttcggtgctggcaccggtgtagatgttgccggcgcggtcggccatgaaaccggcggagagcactacgttggggatcaggtccaccaccagccgcgcatagagttcgatgtaggtgtggatcgcgccgatttccagcaggccgtcttcgagcaactggctgatgcgcagggattgggtgccggcaaaggagaaatcgagcttgcgggcgatgcctttttcaaacaggtccaggtgctcggagcggccgacactgggcatgatcatgtgcaaatcgtggagcttggccgggtcggccttggccagggagcgcgagaggaaatcggcctgtttctggttgttgccttccagcaccacgcggtcgccggggaggatcaacgcctcaagcgcctcgacgatcctgtcgctgggcagcaccgcaccgtctgcgtactgtttgaccagcccgagccgccgctgcttctcgtcgcgccgccgcgtccagcgtgagtcgggggttattgttgttgtcatggtcgctccacgggtttgctgtcgtggggcttaccttaggagtgattgagggggccatcaatcaagctgggcgctggactgttacgcctgggttaatgatgcatcaataaacacgggcgttcaggtgcggtgccattcggtgtggtggaaccatacggtcctgaacaacgccaaggcggcaaaaacgtgcagccccaacacagccgcccaactccactcccacaggcctgatagcgcctgggcgtaaaccggcaacagcagcaagagcagcgccaccagcgcgcagccgcccagttgctcccagtttctcaagcgactgggacgggaggctatggcgtaacccagcagtgcacccaggcacaccaccagcaggctcagcaagtcatgctcgtcgacgggcggccagcccagcaggttgagtggcaagcacaccgcgaacacggtgaacgcgcaaatcgcgacgtacacgaaggcgtattcaagcgcatccagcagacgatcacggataaaccctcgggcctgtttgtcttcttccggggtaggtcctttggatatcgccaccgccagcagacccgagccaagaccgcccagggtcatgaccacaaagttgctcacgacgcccctgattgccttatcggcaccgatcagcttgaggctttccaggtacaccaggataaacaccgcgcctgcggtggtaatcatgaacccccacagcttcccacgattggactgcacgttcatggtcaccgctgccgtgagcaccagcacgccaaaccacatcagaagcgtgccggtaaaacggttgaggtcgtacagccaggcaaacccatccaaaagccacattgcgtcgatacttctgtcgaaaaactcccttggctatcggcagtggggtggggatctttacgaggggaaaggaacaagtgatccgcaacccgtcacaattcaccaggacgcctctcctacattttgatcgagtcatgcccactgatagccagccaacaggccctccacgtttccctgcaacgtggtcgtgctgtcaatcaactgggctaagagcggctcgtcctcatccatatacccttcgtactccgccaggttccgacgctcatgacacagcgccaacaacctcacctgcaccttgccggcacctgtggtgtgaaccaggcattgaaacaccagatagcgtttgtccgagcgatacccctgcaagcgcaaggccgtgagggcgatagcacgagccgcgttgtaagccaggtcgaaacgactggcgaatgataactgcggattgccggcatccctcagccgatccctggctgaacgcatcagcccatcacactctttgcgatccggcggctcagccttcaaaccgccgctacgttgcagattctccaggtttgccttgctgtccatccgtggattccagggggttgcccccaatcagattgatcttgtcctgctgcacgacccgctgcacaaaactgttcccgacattccatttgccgatccagtcttcaggggtgtaaagcgtcgggttgatggtgcgccccagttgctcttccagtggcatgagctgctccatgacttcactgtagttgaggctttcgccgatcaacatgagatctatgtcactggatgagtgcgcctcgcccttggcgatggaaccgtagacaaaggcccaggttatctgctcggcgaaaggtgccagtgcatcgcgcaagggctcgtccagactcagggtcttgcgcacgatagctaacaattccgagtagatagggcattggggattggcttggtaatgggtctggttgccctggcgcgtcatgttcaagatgcccgccaactgcaaccgttcaagctcacgggtgagactgcctttgcccacttgggcccagcgtgcaatttcattggtgaagaagctttggtcgggcttgccgaaaagcaggcccagcactttttgctgggtgacagtgaagagcgcagtgctgagcggcaaggtgtgcatggcagcggccaaagagtcccaaaaagggaacgataggtccctttttgggaacgatcaagttttaagcgactggagaaggggaaatctgttccaaggcacggtccaccagcaactgccccagctccgccatctgctggatgccgagcatgattgcgcgctgggaggtgtccaggtcgaaggcgaggttgcaagtgagtgcgttgagggaggacagggtttcgctggcgttgaccagcagggtttcggtgtcttggtgagggtttacggtgaagaggggcggattgggggtaggtttgatcatgatctacaactccgatatgtgatggagactgccctcttccgcttgcacgcgaattaaggtggcagctgtgcgcaggtgtgcaagaccgggcatatcggaccccggcagaccccgagggatctcccacgcacagccgccataacgagtacagcaggcataaaaaacgcccgttgaatggctatgggcgtttgtgcgccgacatgtaaccggacttgcacgtccgtgtcaccgttttttgcgatgacggggcgaagactaggcgcgctgacggcatgcgacaagttcatgcacagcccaaaatcttgcaggaaaaatccgagagcctgccgacctataacctcatgtctagtctcacagcccctaaaccttcgagcgggtaactacggtactcataaacctcacctcgaacagtgaggcggataaggcccccctgccgggtaacttgaacatccggctctttggttttcagaaaagggtgtgccgacaccaatgtcgtgagtatttcccgatcattccccagatccttgtggacgtagtacaggtaggaaaagcccaccgtagcgccaccctgattgtttcgcgcaccgtaaatggagctcccgttattcagagaatacttgagcacaacctcatccaattccggtggacctgggctcatcaaccaaccaacacccaagtacccgagacacaccaccagcagcccgttgaacaagccctggaccggccaattaatacccttgagctgtggcatattcgataccctccttgatccaatgctggtcgctgtgatcatcgccatacggcgcatcgccccaccagtctccgaactccgcccgagaagtccctgctgccttttgcgccgcaccagccgctctcaacagcacactctccggaatacccagcacagtgccggtgacgccgtagttgaagttaccgaacgcctcatactcgcgacttttctgtttgtaatcccaagggccacgccctctgacctgcgagtaaaaccacgaataggcgaaggccgaaccaggcttcaaatgcatcctgcggttgttggccaaggcgatattgtcttgcagcgaaacgcccgaaggtatgggagggacggccatttgcgaatccttgctgatggggttgagcgataaaaactagcactcaaacatcagtaaaaatacgaaggtgagacttacagaaatttcagacacgctatcagtccgagccctacctacgattgtcgtcccgacaagcaacaaagaatgttctgacagcgctttcaggttgttgctcggaacctgtgtctctagcctttccgctccgaatcgttccgcggacagacatcatgaagccgaccgttaaaaccgatgcaaggccattgcagagcgtgatgtatcacatcacaatcgtgccatgatcgtcagctggaaacacaaaggtctcagggtcttctatgagacaggctcgaccagtggaatcaacgcaaatcatgcaaagcgcttacgccgcgttctgttcattctggacaaagccgaacgtccagatgcactgaacttgcctggttggcgtttccatcggttgaatggcgacctgatcgactattggtctgtcagcattagtggtaactggcgcatcatttttcggatgttcgacgaccaagtcgaactggttgattatcttgattaccactgagtagaggtatcgatatgggcatgcacaacccccctcacccaggtgaaatcctgcttgaagatgtaatccctgccctgaacatcaccatcaccgaaatggcccggcgcctgggattcgcccgtgagacattttcgaggattttgcatgggcgtgcgcctgtcagtcctgacttggcggtgcggcttgagcgggcaggtgtgagcactgggcagttatggctgtcgatgcagagtgcctacgacttgtggcaggccgagcatcgggagcagccggtgattgagcggtttgcgcggattgattgaggtctacggattgtgggaggggcggtacgacgattcgacttgctcccgatagcagtgggtcagccaccagatgcagtgactgacagattgcaatcgggggcaagtcgaatcgtcgcaccgcccctcccacattttgatattcactgggattgagaatgagggatcaggccaggccggactctaccagcagtgcctccagcccaagcaaatccggcaccttcgccacatgctcgcccacctgcaccgccgccagttccagcgggcacagcggcacgtccacataactcaactcactgtcgagcttgtacgacctgggaatgccctggatcaccagcgcaataaacttcaacgtcggccgcccgcccaatgcattcaacaccacgatgcgcgagcgttcgccggtcacgctcgcttcgccgcacaccgcttcaaagctgatcagcgggatttgccggtcgcgccaggtcacttgccgcaggtaccacggcggagaatcgctggccggttcgccgcgctggaagtcgatcaactcggcgatggcgacattgggcagcaccaggtggcggtcggccaggggcagcagcaggccggtgagttggctggtgcggtggtcaagcatgggacttgctccagtaggcgatgctttcgagcagcaccgattcctggtacggcttgcccaggtagtcgttgacgccaatggccatggcgcggtcgcggtgtttctggccggtgcgcgaggtgatcatgatgatcggcagacgcatcagccgggggtcgttgcgcacctgggtcgccacttcgaagccgtccatgcgcggcatttcgatgtcgagcagcatcaggtccggggtgtgttcttcaagcaccgccagcgcgtcgatgccgtctttggcggtgagcacgttcatgccgttgcgctccagcaggcggctggtgactttgcgcacggtgaccgagtcgtccaccaccagcaccagcaacgggcgttttttcagcgggtcgttgaggatcagtggcgcatccaccgactgagccggcaatgccggctgccgcgcacggatatgcgccagcaagtcgatgatcaacaccacacgaccatcgcccaggatcgtcgcgccggacagcccctgcacaccggcaaactgcggccccaggcccttgaccacaatctcccgcgtaccggccatggcgtccacatggatggccacatgccgctcattgcactgcaccagcagtaccggcaccggttgatactgccccagcagtttcgggcggctgacgctgtgcagcaggtcgcccaggtagaacagctcgtaacgctggccggcgtattcataacacggcggatcttgctggtaatgcccggccagctcatggggcagtacccgcaccaggccttcgatggtattgagcgggatcgcgtattggtcgtccgcgcactgcaccatcagcgcccggttgaccgacacggtgaacggcaagcgaatgcggaaatgcacaccctcgcccggggtcgaatcaatgaccatcgagccaccgagctggcgcacttcttcatgcaccacgtccatgcccacgccgcgcccggaaatctgcgtgatcttttcagcagtggagaagcccggctgcaggatgaactgcaacacgtcacggtcgctgatctcctgattcggggccagcaggccacgcttgatcgccttacgccgcacggcttccaacggcacgccggcgccgtcgtcgcgcatgtcgaagacgatatcgccgccttcgtgggtcaggtccagggtgatgcggcctttctccggtttgccagccagcagccgtgcatcgcgggactccaggccgtggtcaacggcattgcgcagcatgtgttccaacggcgccgccatgcgctccagcacgttgcggtccatctcgccttcggcattgccgacgatgaattccacgtccttgcccagctcgcccgccacctggcgcacgatacgcttgaggcgtggcagcatgcgttcgaacggcaccatgcgcgtacgcatcaggccttcctgcaactcggtattgatgcgcgcctgttgctgcagcaggccgtgggcgtcctcgttgcggcgctccagggtgtccttgaggtcgagcaggtcggaagcggattcggacaatgcgcgggacagttgctgcaactgcgaatggcggtccatctccagcgggtcgaactcttcgtagcccaggcgctcggcctcggcctgctggcggctgaggatacggccctgggtttcggtgtcgagacgccgcagttggtcacgcatgcgttcgagggtggtttccacttccgtaagagcgatgcgtgcgtcgttgacctgctgctcgatgcggccacggaagatcgaggtttctccggccaggttgaccagatcatccagcagctcggcggagatcttcaccatgtcggcagtcgggtccacgacggcctccgccttgcccgcaggcaacgccaccggcgtcaccggctcctggctggggtgtaccaggcttttgatgcgctcgatgagcttgtccaccgagccgaccggcaagccgtccgccacggcgtcgatcatctgtgccagacggtcgtggcaaccttgcagcaacgcaaacagctcaggcgacggcgcgagcaggccggcagacaggccttcgtagagaaattccagttcgtgggccaggtcgccaatgggcgcaatctcgaccatgcgcgcgccgcccttgagcgtatgcaggtcacgcagcagggtctccacctcctggcgattgccgggctcggcctgccagcgcgacagcgccgcactggaactgtcgagaatgtcggccgcctcttcgaggaagatatccagcagttcagggtcggcgcccgacgccgctggcgcagcggccggtgcggcaggcgcgttgccttggcgcagcgcccgcaccttggcgatcagctctgcgttgtcgctcaagggttggtgatgctgcagctcttcaagctgcaaggcgaggcgctcatggctggccatcaacacctgggacaattcggcggagtaactgtagcgacggtccaccaacccttcgtacaggcattccaactcatgggccaggtcgccaatcgggccgatttcggccatgcgcgccccccctttgagggtgtgcagatcgcgctgcaatgacgacaacggcgcagcactgtcgggctctagcagccagcgcttgagcgactggccagcgctgtcgaggatgtccacggcttcttcgagaaagatctcgacgatctcgtcgtccatcgtgatttcgtgatccaactgctgggtagcggcgcccagttcggcaatgctcagcactcggctgccgtcacttttgatcaagccggtggcggacgggtcgagggcttcatccagcagttcgcgcaaggcctcgacccgcgccggcgccgggctgatttcctggccggcggccagttggtcgagcatgctgatcagcgcttcatgggcctgttcagcctcgtggaaaaaccgctcgctcaccgccaggctgctttcttctaccgccccgtacaaatccagcaaggcttcgcagagttcgtcgatggcgtgcagatccgcgacgtgcgcgccttcgcccagggtggtcagttcatccagcagtgccgtcagctcctggcgctcgccggggtgctgctgccagcggcgcagcaggctctcggcgtcgagcaggatgtccatgccttgggccaggaagttggcgatcagctgcggatcgcgcttgatgcgcacgtcgagcagcgcttcaagctgctgatccagcaggctttgcgtgcgcttgatcaggtcctctgcaccgttgatcggcgccaagggatcactgtccaggtcgcgcagcccacgctggaacaggccttcggcttccagcagcaattccacttcatccaggtccagcggcaggcggtgggccttgtattcgcgggtcaggtggtccagcgggcgtgccagttcggcgatgggcagcacgccggccatgtaggcgctgcccttgagggtgtgcagggcacgttgcagttcatcgctgacttgcagcggcacatgctcggcggcctgttgcaggaagtggttgaggctgtccaggtggctctgggcttcgttgcggaagatctccagcaacatcggatcatggggttcggcggccggcacagatgtaccactggccaaggtatgcgcgcgggcggccagggcgtcgacttcatcgcgttggcgctggtcgtcgatggcaaagtcagcaatcaattccggcagcagggccaccgcttcatccagcacctgctgcacctcggggccgagcaccacgctgcgctccagcacacggttgagcaggttttccatggcccaggccagctcggccaagaccagggcgcgcaccatacggccgctgcccttgagggtgtggaaagcgcggcgcatttcgccctgggcggttttgtccgcgctgttgggcaggtaacggtgcagcacttcgaggacttcatcggtttcttcgaggaagacttcgcgcagttcgtcgtcgatgggctcctcgtcggcgggcggcggcagcaggctgccggggcgttgcagggccggcgggttgaggcgcgacgtcggactggccagggcgtcgaattgggattggctcggcgcgagttcggccggcagtgcgccatccggtgcaaccaacgcctggcgccagggtttctcggcaggcaggtaacccagcgccgccaagccttgagtggccagctccagcacgcgctcacctgcagcatcggggtcctggagcatgcgttcgaggtagtactccaggctgctgatcacgtcggcgaaatgcgccaattgcatctcggacggtggcgcgtcgctgcccatcaactgttcgtcgacgtaatccgtgcacccgtgcatcaggctcgctgcgcgaggcaacgggatcatcgccagggcaccgcgcacctggctcagcagctcgggcagggactccaggcgctgacggtcccaatcggcttcgatgcagtcgatcaccagttccttggcttgcttgaggcactggcaggactcgcgaatcaccaattggtgaatctgggtcaggtcggtggtgggcaggcggctttcttcgcggctctccggctcgacggtgccaaccatgccggccagcgtggcttcgacgtagagcaaggcgccggcgacatccatcagcaccgcgtcgttgggctcgcgttggccctgagccaggctcagcaccacggcgagttggtcgatgatgactttgcgcggctggccgaagcccagcaccgccagggtgtcggcgatctgccgcagcggtgcgagcagtgcatccaggtcgctggtgtgttgacggtcgctgcgcacgaacaagtcgaggcgctccttgactcgtaccagttcttcgcacaaggcaccgagtaccgaccccatcgcattgcggtccggcccggccaggcgtgcgcgctcggcgtcgaccaccgcgctgtcgggcagggcttcatccaggccgtagcgttccttcaagctttgcatgcgcggcgtcggccgagtgaccttggcgacgtaaaacaacaggctcttgagcagttcatccggcgccggctggttgatcccgccgatgccttgggccagcaggcgcttgagctgtttatcactggccttgagcaggctgcgcagcgccgggctgttggcgatcacaccggtgagcataccttcgaccagcgccgaggtgacttgccacagcggcaacaacggcgcgccctggcacaaggcttcgaggcgcgcgaacacccgcgccatgtcttccaggttgctggggccgtggtcttcgcgcagcaacccggccaaggcctgttgcagcagttggtgccactggcgcagttgctctttcaggtcgggtacggcgcgttgggccagggcttcgtcgggcaacggggcgatcgtcaacagttgcggactgaacaggctggtctccgacagcaggctttcaccgcgcgcgctgcgtaggtcgttgagcaatggcaacaccaccagcggcaggtcacgccgggcgctgtgcacacggtccagatacaacggcaattggttgagggcctgttgcagcaggcggatgctttcgtcgcgctggctcacgcggtcggcttgcagcgccagggccagtgcttcgatttcctcggccagcagggccgcgccatagaactcgaccatttgcagcgcgccatgcgcttgatggacacacgccaggcactcgccgatggcatcgccgtcggaggtttcgacgtacgcatcgagcgccgaacgggcctgtttcagggtttcggcaatgtcgcccttgacccattcgagggccacgtagtcgtgccgatcaaccataactgctccgcttagaattcatgggttgctggtggtgcgaggtctcaagacagatagagatcaaatgtgggagggggcttgcccccgatggcggtgcatcagtcaaagattgggtgactgacccactgctatcgggggcaagccccctcccacattgacactgcatttcaatcatcaacctgctttgcgggcgggagggtgaaccccgacaccgaccgtcgcaactggctggccatcttcgccaaattgccgatgctttcggcggtcgccgtggagcccgacgaggtctgggtggtgatctgctggatcacgttcatggtcagggagatctgccccgccgaactcgtctgctgctgcgccgcgttggagatgctctggatcagcgccgccagggttttcgacacgccctcgatctcttccagcgccaccccggcatcctgggccagccgtgcgccgcgcaccacttcggtggtggtctgctccatggaaatcaccgcttcgttggtgtcggcctggatcgcccgcaccagggtttcaatctgccgggtcgccgccgacgagcgctcggccaggcgctgcacttcatcggccaccaccgcaaagccgcgcccggcatccccggccatgctcgcctggatcgccgcgttgagggcgaggatgttggtctggtcggcaatgtcgtcgatcaggctgacgatgtcgccaatctcctgggacgactcgcccaggcgtttgatgcgcttagcggtgtcctggatctgttcgcgaatgttgtccatgccgtggatggtgttgtgcaccacctcgttgcccttgttggcaatttccaccgagcgctccgccaccgccgaggattcggcggcgttggccgatacctggtcgatggactgggccatctggttgatcgccgttgaggcctcggcgatctgctgggcctggtgctccgaggcctgggccaggtgcatggcagtggcctgggtgtcctgcactgcaccagcgacttgcccggcggtgaggttgatggtggcgaccaggtcgcgcaactggtcgacggaatagttgatggagtcggcgatggtgccggtgaagtcttcggtcaccgaggcggtcacggtgaggtcgccgtcggccaggtcttcgatttcatccagcaggcgcatgatcgcgttctgattgcgctcgttcttctcggcggtttcatgcagttggcggttggtctcgcgcaccatcaccaggccgatcaggatgatcgaggtcagcgccagcaggcccagcacatagccgccgatggtgtcgaagctgcgcccgccggccaggttttcgaaaccggtggccaggtgcgaagcttcatcgagcagggtttgcgacaggttgaagatattgctcgccgaggcacggacctggaacagttgcggcgaggtttcgaggatttcatccacggagcctgagacaaactcgaacagctcggcgatttccgccagccgcgcgcgggcatcgcggtcttcgacctgggtaatgcgcaggccggggttgccctggagcatgccgttgagcacctggccgaagcggttggcatcgcggccgaaggcgtcggcggcctgcacggcggtttcgtcgccggccagtacggtgttcaccgcccccaggatacgctcggccagcaacgactggcgctgggccagggcgacctggctggctggggcgccgcgctgcagcagaatgtcgacgaccttttccgactccacctgcaactgcggaacggtttccgccagcgtcgccgcgacctggtgcaaggacagcacggtctgttcgctggcgaggatcgcgtcggtgtttttcagcagcgcttcccagtcggtctgcaccgcacgcatttcagcacgtaccgcactgggcgcggccggcaggccggtttccgggtcaccttttttcaggtagccccagcgctgggcgaagtcgttgcgcgcatcccccagcagcttgaacgcggcggccttgccggcagcggcttcggtggcgttcttggcgatgcgctgggacagcacgcgcagctcaccggcgtggccgatgtactgcttgtcataggtggactgggtgttgaggtacgcgaagttggcgaacagcaacatgatgaacacgatcagtgcaatgaacagcacgatgatctgggagcggctgcgtgacgcggcctggggttttggcggggtaacggtggtcatgcggcaacatccatgaagccaggggcctgggccagggcgaaggggctgaagacctgccactgcgggttgccctcgaaacgcccctggatatacggtgcaccgggagcggcactcgccagcagtgcgtcttgtgcgaaatgctgcatccccatcacctcgtccaccagcagcccgacaaacaaatcgttgaattccaccaccaatacgcgccgctgtttgcgcgccttggacaactcaaggccgaggaacccgcccaggtccatcaccggcaacaagcgcccacgcaggttagccacacccttgacccaggccttgaccccgggcatcagcgtgcagcgcggttcatgcaggacttcggcaacttcgcccatgggcgccacataccagtgctgccccaggcgaaagccgatcccgctccagcgttgcaggcgggtttcctgggacggcaggtcggcggccaacaggcgacagcggcggtcgatgtccagcagcagctcaaaggcggtttgcgactcggtcatgatggcgaaccgtcagccggccagcaccttgttcagggtggcgatcagggtttcttcatccaccggtttggtcaggtagtccttggcgccctggcgagcgccccagatcttgtcggtttcctggtccttggtggtgatgatgatgatcgggatgccgttggtttccggctccttggacagctggcgggtggcctggaagccattgaggcccggcatcacgatgtccatcagcacggcgtcgggcttttcctggcgggccagggccacaccatccgcaccgttttcggccttgaggacctggtggccatgcttttccagcatgccggtcagtttgtacatttcggtcggcgaatcgtcgacgatcagaacacgtgccatggttttccccactacataggtggacgccggcccttgtgaggcggcgtcagtgtgcttgttctactacggcgaaccccggcacgtaggccttgatcgcgcccagcagttcttccttgctgaaaggcttggtcaaaaactgatcgacacccacgatgcgccccttggccttgtcgaacaagccgtccttggacgacagcatgatcaccgggatcgacttgaacgccgggttgttcttcaccagcgcgcaggtctgatagccatccaggcgcggcatcatgatgtcgacaaaaataatgtgcgggtgatgatccacgatccgggccagggcgtcgaaaccgtcgatggccgtgatgacatcgcaccccgtgttcttcaacaaggtctcggcggtgcggcggatcgtcttcgaatcgtcgatcaccatcactctcaaggcgttggaatgctgttccatatctgctctgccatcgccacagcgaatcggttttcggtgtgtactgcctgatgttgcacaggatgaacgccacaagcctcggaattcaagggctgctgcgccgtggcagtctttttagcacagtctccgggcgcaatctatcgagcaaccggccaggtggtttttccttgacccacaacagccgcagcgccactctgacgccacttttatgcgccctaatttgctagaggaaatcccccatgagcgttcgcgtcggcattgtcatggaccctatcgccagcatttcctataaaaaggacagctcgctggccatgctcctggccgcccaggcccgcggctggacgttgttctatatggaacagcgcgatctttaccagggcgacggcgaggctcgcgcacgcatgcgtccgctgcaggtgtttgccaacccgcagaagtggttcgagctgcaagacgaagtcgacagcccgctgagcgatctggacgtgatcctgatgcgcaaggacccgccgttcgacatggagttcgtctactccacctacctgctggagcaggccgagcgcgccggcgtgctgatcgtcaacaagccgcagagcctgcgcgactgcaacgaaaagctgtttgccaccctgttcccacagtgcacgccgccgaccgtggtcagccgccgcgccgacgtgctgcgtgaattcgccgccaaacatggcgatgtgatcctcaagccgctggacggcatgggcggcacctcgatcttccgtcaccgcgcaggcgacccgaacctgtcggtgatcctggaaaccctgaccgccctgggcacccaacagatcatgggccaggcgtacctgcctgcgatcaaggacggcgacaagcgcatcctgatgattgacggcgagccggtggattactgcctggcgcgcatcccggccgccggcgagacccgtggcaacctggcagccggtggtcggggtgaagcccgccctctgtcggacaaggaccgttggattgccgcccaggttggcccgaccctgcgcgaaaaaggcctgctgttcgtgggactggatgtgatcggcgagaacctcaccgaaatcaacgtcaccagccccacctgcattcgcgagatcgacaacgcatttggcacgaacatcggcgaaatgttgatggccgccattgagcgcaagctgcaagccaagtgatatagaacagccggacacgcaccaacattgcgctatcatgccccacctgtgaaacgcgcgatgttggtttttttgtcatgacactcccgtccgaactgccccccgaactctcccacagcggcgtgcgcccggctgatcggctcggatttaccctgttcctggcggcgttgattcacttggccctgatcctcggcgtgggctttaccatggtcgaacccaagcaaatcacccagaccctagaaatcaccctcgccacgttcaagagcgaaaagaagcccgagaaggccgacttcctcgcccaggacaaccagcagggcagcggcaccctcgacaagaaagccgtgcccaagaccaccgaagtcgcgccgttccaggacaataaggtcaacaaagtcaccccgccaccggcgcccaagccggaggtcaagcaggcagcgcccaagccagccgtgaccaccatcgcccccaaaccgcagaaagccccggcccaacgcgaaaaaaccaagaccgaacccacgcccgagcccgtaaaaccggcgccgactttcgacagctcgaccctgtccgacgaaatctccagcctcgaagccgaactggccaatgaacagcagctgtacgccaagcgcccgcgcatctaccggctgaatgccgcctcgaccatgcgcgacaaaggcgcctggtataaggacgaatggcgcaagaaggtcgagcgtatcggcaacctcaattacccggaggaagcccgacgccagcagatttacggaaatttgcgtctattggtgtcaatcaaccgcgacggcacattgtatgaagtgcaggtgctggaatcgtccggccagccgctgctggaccaggccgcccagcgtatcgtgcgcctggccgcgccctttgcgccgttcagcggcgacttgaacgacgtcgaccgcctggaaatcatccgcacctggaaatttgccaagggcgatcggctgtcgagcaattgatgacaattgccgcctgtggcacatcaccagcttgtcagttcgcccctcccccgccacactagcggacatgaaaaatgtcagcccgacctacctcaagcaccacttcctgatcgccatgccccatatggccgacccgaactttgcgcaaaccttgacctacatcgtcgagcacaccgccaagggtgcgatggggttggtagttaaccgcccgcaggcgctgaatttggcggatatccttgagcaactgcgccccgagatcgacccgccggcccgttgccagggcgtgccgatctatattggtgggccggtgcagaccgatcgcggctttgtgctgcaccccaccgggccgaagttccaggccacggtcgatcttgacggcgtatcgctgtccacttcccaggacgtgttgttcgccatcgccgatggcgtgggccctgatcaaagcgtgatcaccctcggctacgcgggctgggaagccggccaactggaggcagaactggccagcaatgcctggctgacctgcccgttcgacgccgacatcctgttcaacaccgtcagcgaactgcgcctggacgcagcggcggcgacgctaggaatcaacctcaacctgctgaccagccaggcggggcacgcctgatggctttgcgtctgatccttggctttgactacggcaccaaacagatcggcgtagcggtcggccaggtgatcaccggccaggcccgcgagttgtgtaccttgaaagcccagaatggcgtgccggactggaaccaggtcgaggccctcataaaagagtggaagcccgacgcggtcgtggtcgggctacccctgaacatggacggcacccccagcgacatgtgcctgcgcgccgaaaaattcgcccgccgactcaatggccgctacaacctgcccttctatacccacgacgaacgcctcaccacctttgaagccaagggcgagcgccgtgaccgtggcggacaaaagggcagctaccgcgacaacccggtagacgccatcgccgccgccctgctgttgcagggctggctggatgaaaacaccgctttatttgaatcctgactgacgcggcttgccgcgtctttttacgtttgagcccggtccttgcctgcgcgaggcctagaaggagcccccatgagcctgccgaaccccgccgaactgatcagccagatggccaccagcctcacggcccatctgcaacaccgcaacatcagcgagccacgcttcatcggcattcgcaccggcggtgtgtgggtggcccaggcgctgctggaagcactgggcagcgagtcgcccctgggcaccttggacgtgtccttctaccgcgacgacttcagccagaacggcctgcacccgcaagtgcgcccgtcggccctgccgttcgagatcgaaggccagcacctggtgctgatcgacgacgtattgatgagcggccgcaccatccgcgccgccatgaacgaactgttcgactacggccgcccggccagcgtgaccctggtgtgcctgctggacctggacgccggcgaattgccgatcagcccggacgtagtcggcgccaccctgtcgcttgaagcccatcaacgggtaaaattgctcggtcccacgccgctcgtactcgaactgcaagacctcgccctttaaaccgccttgtaaagagtccccgcgatgacgcctctagatgccaagcgcccgctgcagctcaatgctcagggccagttgcaacacttcttgtccctcgacggtttgccccgcgaactgctcaccgaaatcctcgacaccgccgactcgtttctcgaagtcggtggccgggcggtgaagaaggtcccgctgttgcgcggcaagaccatctgcaacgtgttcttcgagaactccacccgcacccgcaccaccttcgaactggcggcccagcggctgtcggccgacgtgatcacgctgaacgtgtccacctcatcggcaagcaagggcgaaaccctgctcgacaccctgcgcaacctggaagccatggccgccgacatgttcgtggtacgccacggcgactccggcgctgcacacttcatcgccgagcatgtgtgcccgcaggtggcgatcatcaacggcggtgacggccgccacgcccacccgacccaaggcatgctcgacatgctcaccatccgtcggcacaagggcagctttgaaaacctctcggtggcgatcgtcggcgacatcctgcactcgcgggtcgcgcgctcgaacatgctggccctcaaagccctgggttgcccggatatccgcgtgatcgcgccgaaaaccctgctgcccatcggtatcgaacagtacggcgtgaaggtctacaccgacatggctgcaggcctgaaggacgtggacgtggtgatcatgctgcgcctgcaacgcgagcgcatgaccggtggcctgctgccgagcgaaggcgagttcttccgcctgttcggcctgaccaccgcacgcctggccggcgccaagccggatgccatcgtgatgcaccctggcccgatcaaccgtggcgtggagattgagtcggcggtggccgacggtccgcagtcggtgatcctcaaccaggtgacctacggcatcgccgtacgcatggccgtgctgtccatggccatgagcgggcaaaccgcgcaacgtcaattcgagcaggagaacgcccagtgaagctcagcatcctcggcgcccgcgtcatcgatccggccagtggcctggatcaagttaccgatctgcatctggaagccggcaagatcattgccattggcgcggcgcccgcaggcttcaacgccagcgagaccatcgacgccaaaggcctggtggccgcgcctggcctggtcgacctgaacgtcgcactgcgcgagccgggttacagccgcaagggcaacatcaccagcgaaacccgcgccgccgccgccggtggcgtgactagcctgtgctgcccaccgcacaccaagccggtgctggacacctcggcggtgactgagctgatcctcgaccgcgcccgtgaagccggcaactgcaaagtgttcccaatcggcgcactgagcaagggcctggaaggcgaacaactcgccgagctgatcgccctgcgcgacgccggttgcgtggccttcggcaacggtctggaaagctttcgcagcacccgcacgctgttacgtgccctggagtacgcggccactttcgacctgacggtgatcttccattcccaggaccgtgaccttgccgaaggcggcctggcccatgaaggcgccgtggccagcttcctcggcctgccgggcatcccggaaaccgccgagaccgtggccctggcccgtgacctgctgctggtggaacaaagcggcgtgcgcgcgcacttcagccagttgaccagtgcgcggggcgtggccttgatcgcccaggcgcaggcccgtggcttgccggtgacggcggatgtggcgttgtaccaactgattctgacggacgaagcgctgatcgacttctccagcctgtaccacgtgcaaccgcccctgcgcaccctggccgaccgcgacggtttgcgcgcagcggtgaaatccggtgtggtctcggcgatttccagccatcaccagccccatgaacgggatgccaagctggcaccgtttggcgcgacagagccgggtatcagcagtgttgaactgttgctgccgctggcgatgacgctggtagaggatgggttgctggacttgccgacattgttggcacgcttgagcagcggcccagccgaggccctgcgtctgccggcgggcaagttggcggtgggttcggcggcggatctggtgctgtttgatccggccagctccacggttgccggggaacactggctgtccaggggtgaaaactgcccgttcatcggccatagcctgccggcgacggtgcgttacaccctggtggatggacgtatcacctaccaggcctgatagacatccaatgtgggagggggcttgcccccgatagcggtagatcagtcagcttatctgtagctgacccactgcaatcgggggcaagccccctcccacatgttgatctccaccagaagttaaagatcagcgaccgctgttgcgctcggcattgcggatcgatatctgcgtattcaacgtccagaagtcatacagcacccccaccaggaacaaaccgccggtcagcaggtagatcaggccggagatccatttgccctggtacatgcggtgcacgccaaacaccccgagaaacgccagcagaatccaggccacgttgtattcgataggcccggcggtaaatcgcaggtccgcttcacggtccatggccgggatcaggaacaggtcgatcagccagccgatacccagcaagccaaaggtgaaaaaccagatcgtaccggtcaccggcttgccgtaatagaagcggtgcgctccggtaaaaccgaaaatccacagcaggtaaccgatcaccttgctgtgggtgtcttgctgctcgccaatctgctgataggtgttcatcgcgtacctcttttgcctcgatagataaattttttcattttctttgtgacttttttacgggcgcccgacgtacggcaaatggtatcttccctgccctgaaagccttatgccacctgacttgtgtaggacaattgcggcgaatcgtcgcgtttttcctgattttgacgtcaaggttcagtcgacaaacggcctgagaacgacacaaaaagctgttataaagttgcgcgcaaacccataagagccacgcctaatgcgaccatttttcaagacatggctaaccatttgcctattaatgccactggccgcccacgccaccaatcgtgagcaacgacttcccaacgttaacggtttcacccctaaagtccacagcacgccaagcaccgccaagtcggtcaagctgaccgtcaaccgcccgactcaactgagcaaggcccacggtaaagccacggccggcctggtaggcgtcaacaccaagcagagcagcaccgtgcttagccgcgccgtcaacgtgctcggtactccttatcgttggggcggcagcagcccaagtaaagggttcgactgcagcggtttggtgaaatatgcgttcaacgacgtcgccgctgtggatttgccgcgcacttccaacgccatggccgctggccacgggcagaaggttgatcgcaaggacctgaaaccgggtgacctgctgttcttcaaactgaagagtcgccaggttaaccacgttgccatctacctgggcaacgaccgcttcatccacgcaccgcgccgtggcaaagcggtcagcatcgacacgctgaaaaagccgttctgggacaagaactacgtgattgccaagcgggtgctgcctaaagagcagaacaacctgcgggtcgtgcagcgctgattccaggctggaatgcgataaacaatgtgggagggggcttgcccccgattacagtgggtcagctacaaataagctaactgatccactgctatcggaggcaagccctctccctcatttggagcttcatatatccccaggcaccctcgccttctgctgcgcctcttcccgactgatcaccccctccccgaccaacgccctcaagctcatatccagcgtcttcatccccaacgccccaccggtctgtatggccgagaccatctgcgccaccttgtcctcacggatcagattgcggatagccggcgtgcccagcatgatttcatgggccgccacacgcccgccgccgatcttcctcaccagcacctgggacaccaccgcctgcaacgactccgacagcatcgagcggatcatggccttttcccccgccggaaacacgtccaccagccgatccacggtctttgccgccgacgaggtgtgcaaggtgccgaacaccaggtgcccggtctcagccgccgtcagggccaggcggatggtttccaagtcgcgcagttcacccaccaggatcacgtccgggtcttcccggagcgccgagcgcagggcaacggaaaagctgtgggtatcgcggtgcacctggcgttgattgatcaacgccattttcggcgtgtggataaattcgatggggtcttccagggtcaggatgtgctggcgccgatgccgattgagaaaatcgatcatcgccgccagggtggtggacttgcccgagccggtggggccggtcaccagtaccaggccgcgcggcagttgggcaatacgctggaatacttcccccaggccgaggcgctccaggctttggacctcggacgggatggcacgaaacaccgcgcccatgccacggtcctgccggaacacattggcgcggaaccgcgcgacaccgggcagctcgaaggcaaaatccgtttcaagagatgtttcgaaatccttttgttggtgctgattgagcaatgggctcaacaagtccgccacttgcgggggtgaaagcaccggcccatccagcggccagacctcgccatccacccgcagcatcggcgccaggccggcggacaaatgcaggtcggaggcgccacggcacacgctggccgtgagtaattcagtgatatccatagggctttccatttccagtagaatgccgcggactccatatccacgggcgcatcttgaatgtcgacgatagcagacaacatcggccaggttagccagcgcatccgcgccgctgccgacgccgtgcaacgtgacgcaagcagcatccacctgctggccgtgagcaagaccaaacccgcgcaggcagtgcgcgaagcctatgccgccggcatgcgcgactttggcgagaactatctgcaggaagccctgggcaaacaggccgaattaaccgacctgcccttgagttggcacttcatcggccccattcaatcgaacaagacgcgcgctatcgccgagaacttcgcctgggtgcattccgtggatcgcctcaaaattgcacaacgcctgtccgaacaacgcccggccgacctgccaccgctgaacatctgcatccaggtcaacgtcagcggcgaagccagcaagtccggctgtacacccgccgacctgccagccctggccaacgctatcagcgccctgccgcgcctgaagctgcgtggcctgatggcaatccccgagccgaccgaagagcgcgccgcgcaagacgcagccttcgccaccgtgcgcgagctacaagccagtttgaacctggcgctggacacactttccatgggcatgagccacgaccttgagtcggccattgcccaaggcgccacctgggtgcggatcggtaccgccctgtttggcgcccgcgactacggccagccatgaaatggctgacttccatttagctaaggacctgtcatgagagacacgcgtatagcctttatcggcgccggtaacatggcggccagcctgatcggtggcctgcgggccaagggcctggatgccgcgcagatccgcgccagcgacccgggtgccgacacccgtgcccgcgtcagcgccgagcacggtattgaaacctttgccgacaacgccgaggccatccagggcgtcgatgtaattgtgctggcggtgaagccgcaggccatgaaggccgtgtgcgaaagcctgcgtccaagcctgcagccgcagcaactggtggtgtccatcgccgccggcatcacctgcgccagcatgaacacctggctcggcgcccagccgatcgtgcgctgcatgcccaacacccctgccctggtcagccaaggcgtgagcggcttgtacgccaccgccgaagtgagcgccgaacaacgcgaccaggcgcaagagctgctgtccgccgtgggcctcgccctgtggctggagcaggaacagcaactggacgcggtcaccgccgtatccggcagcggcccggcgtatttcttcctcctgatcgaagccatgaccgccgccggcgtgaagctgggcctatccaaggacgttgccgaacaactggccgagcagaccgccctgggtgctgcgcgcatggcggtgtccagcgatgtggatgccgccgagctgcgccgccgcgtgacctcgccgggcggcaccacacaggcggccatcgagtcgttccaggccgggggctttgaagccctggtggaaaaagcattgggtgccgctgcgcaccgctcggcggaactcgccgaacaactgggcaaataaggagccaacatgattggtttgaataccgcagccgtctacgtgctgcaaaccctcggcagcctctacctgctgatcgtcctgatgcgcttcgtactgcaactggtgcgtgcgaacttctacaacccgctgtgccagttcatcgtcaaggccacccaaccgctgctcaagccgttgcgccggatcatcccgagcctgttcggcctggacatgtcgtcgctggtactggcgatcctggtgcagttggccttgatggcgctgaccctgctgctgacctacggcaccaccggcaacttcgtacagttgctgatctgggccatcatcggcgtgaccgcgctgttcttgaagatcttcttcttcgccctgatcatcagtgtgatcctgtcctgggtcgcccccggtagccacaaccctggcgccgagctggtgaaccagatctgcgagccggccctggcgccgttccgccgcctgctgccaaacctgggcggcctggatatctcgccgatcctggcgttcatggtgctcaagttgctggacatgctggtgatcaacaacctggcggccatgaccgggatgccggagattttgcgtctgctgatctgacgcaaagcaaatgtgagaggggcggtacgacgattcggcttgcccccgataacggtgtaccagccaccatttgtagtgactgacagactgctatcgggggcaagccccctcccacatttcaaaccgctcaggccattgcttgccgctaggtgcagcggtctttagacttacgcctcatttaaacgagagcagggtcgatgccagctgcctttccccccgattctgttggactggtcgtgccccaagtggcgcacttcagcgaaccactggccctggcctgcggccgttcgctgcccgcctacgacctgatctatgaaacctatggccaactgaacgccacggcgagcaacgccgtgctgatctgccatgccttgtccggccatcatcacgcagccggtttccattcggtcgacgagcgcaaacccggctggtgggacagttgcatcggccccggcaagcccatcgacaccaacaagttctttgtggtcagcctgaacaacctcggcggctgcaacggctcaaccggccccagcagcctcaacccggaaaccggcaagccattcggcgccgacttcccggtgctcaccgtggaagactgggtgcatagccaagcgcgcctggccgaccggctgggcatcagccagtgggctgcggtgatcggcggcagcctgggcggcatgcaggcactgcaatggaccatcacctacccggaccgcgtgcgccactgcctggcaatcgcctcggcccccaagctgtcggcgcagaacatcgccttcaacgaagtggcgcgccaggccatcctcaccgacccggagttccacggtggttcgttccaggaagccggcgtgattcccaagcgcggcctgatgctggcgcggatggtcgggcatatcacctacctgtccgatgactccatgggcgagaaattcggccgtggcctcaagagcgagaaactcaactacgacttccacagcgtcgagttccaggtggaaagctacctgcgctaccagggcgaggagttctcggggcgtttcgatgccaacacctacctgctgatgaccaaggcgctggactacttcgacccggccgcccaccacgacgacgacctggcgaaaaccttcgaaggcgccacggccaagttctgcgtgatgtcgttcaccaccgactggcgcttctcgccggcccgctcccgcgagctggtggacgcgctgatggcggcacgcaaagacgtctgctacctggagatcgatgcaccgcaaggccacgacgccttcctgatcccgatcccgcgttacttgcaggcgttcggcaattacatgaaccggattactgtgtgagaacgccatgagagccgacctggaaatcatccaagactggatccccgccggcagccgcgtgctcgacctgggctgcggcgatggcgaactgctgagctggctgcgcgacaacaagcaagtcaccggctacggcctggaaaacgactcggacaacatcgcccagtgcgtggccaagggcatcaacgtgatcgagcaggacctggacaagggcctgggcaactttgccagcaacagcttcgacatcgtggtgatgacccaggcgctgcaggcggtgcactacccggaccgcatcctcgacgaaatgctgcgtgtaggccgccagtgcatcatcaccttccccaacttcgggcactggcgctgccgctggtacctggccaccaagggccgcatgccggtgtcggacttcctgccgtacacctggtacaacacgccgaacatccacttctgcaccttcgaagacttcgaagccctgtgcagtgagcgtgaagccaaggtgatcaaccgtcttgccgtcgatcaacagcatcgtcacggctgggcgagtaaactatggcccaatctgttgggcgaaatcggtatctaccgggtcagcagtcctggcctgacggaccacaagattgccgtctaatcatcttcaagagggacgctcatgagtcgtttggctatttttctattgaccgcctgcctgggcgccaacgccatggccgcggacgctatagacgctaaccgcaagaaagacttcggcgatatcaccgtccactacaacacgttcacctccagcttcctgcaaccggaaaccgcccaggccgtcggcgtggtgcgcagcaaggagaagggcctgatcaacgtgaccgtgatcaagggcgtgaccccggtggccgcgcaagtgaccggcaccatcaaggacttgggcggcaagagcgaagtcctcaccttcaaacagatcaacgagaaaggcggcatcaattacctggcgccctactccgtgacgcagcgcgaatacaagacgtttaccatcaacgttgaaaccggcggcaaagcccatagcttccagttcaaccaggaactgtttccggcggaataatgaacctcacccaactcgtactggccagccataacgccggcaaactcaaagaactgcaagccatgctcggtgactccgtgcaactgcgctccatcggcgagttcagccaggtggagccggaagagaccggcctgtcgttcgtcgagaacgctatcctcaaggcgcgcaacgccgcacgtatctccggtttgccggcgctggcggatgactcggggctggcggtggacttcctcggcggcgcgcctggcatctattcggcacgctacgccgacggcaaaggcgatgcagccaacaacgccaagctgctggacgcgctcaaggacgtaccggacgccgaacgcggcgctcagttcgtctgcgtgctggccctggtgcggcacgccgatgacccgctgccgatcctctgcgaaggcctgtggcacgggcgcatcctgcatgccgccagcggcgagcatgggtttggctatgacccgctgttctgggtgccggagcgtaacgtttccagtgccgaactgagcccggccgacaagaaccagatcagccaccgtgctcgcgcaatggatttgctgcgccaacgcctgagcctgaaatgacccagaacacctctgcgcagccgctgatccacggcggcgcgcaaacacctcgggcggccttgcctgtgctgccgcccctggcgctgtacatccacatcccgtggtgcgtgcgcaaatgcccttattgcgacttcaactcccacaccgccagcaaagtgctgccggaagaagagtatgtggacgcgctgctggcggaccttgatcaggacctgcacgccgtgtatggccgtgagctgagttcgatcttcttcggcggcggtacgccaagcctgttcagcgccgcagcgctggggcggctgctcaagggtgtggaagcacgcatcccgtttgccggcgatatcgagatcaccctggaagccaaccccgggacgttcgagcaagaaaagttcgtggcctatcgcaagctggggatcaatcgcctgtccatcggcatccagagcttccagcaggcaaagcttgaggccctcggccgtatccacaatggcgacgaagccgtacgcgccgccggcatggcgcgccaggctggctttgataacttcaacctggacttgatgcacgggctgcccgatcagtccctggacgatgccttgagcgacctgcgccaggccatcgctttgaagccgacgcacttgtcctggtaccaactgaccctagaacccaacaccgtgttctggaaccagccacctgcgctgccggaagacgacaccctgtgggacatccaggaagccggccaggcgctgctcgccgagcacggttacgcgcaatatgaagtgtcggcgtatgcccaaccgggtcgcccggcgcggcataacctcaattactggagcttcggtgactttatcggcatcggcgccggcgcccacggcaagctcagccacccggacgggcgcatcgtgcgcacttggaagacgcgggcaccgaaggactacctcaacccggccaaaagcttccaggccggcgcgaaggaactgaccaacgaagagctgccattcgagttcctgatgaacgccctgcgcctcaccgaaggcgtcgatgccaggctctacgccgagcgtaccggtctcgatctggcgagcctcgatgaaggccgccgcgaggcagaacaaagtggcttaatgcaggtcgaaccgtcacgcctggcggcgaccgaccgcgggcaactctttctcaatgatctgttgcagaagtttttgagctgacgctcttaaggaaatcgaatggatttggtactcgacctgctcgccaccgtgtcccgctggagccgtagcaacctgtcggaaatctccctggccctggtgggctgcctgttggtgctgtttggcgccgacatcaagggctggatcgaagcacgcctgggcagcatcgcgggtgcgttgcgcgtgccgttgatggcgctggtgtgcatgatcggcagcggcgcggcgttgatttatgccacgccgtggattgtgcgggggttgagccagttcaataactacagcctggcgccggtgttgattgtcgtactggtgttgatcggcgtagtcgcagaccgccgctgatcctgagcaaaacgtcgatacaaatgtgggagggggcttgcccccgatggcggtggaccagtcactctatggggtgactgacactctgctatcgggggcaagcgccctcccacatttgattgcattgcaactcagaggcgagttacgccagcttctcgaacttcaaatcccacaccccatgccccagccgctcaccacgacgctcgaacttggtaatcggacgctcggccgggcgtggcacgcatttgccgttttcagccaggttgcggtagccaggggccacgttcatcacttccagcatgtattccgcatacggctcccaatcggtggccatgtgcaggatgccgcccactttcagcttggtgcgcaccagttccgcaaaggaggcctggacgatgcggcgcttgtggtgacgggctttgtgccatgggtccgggaagaacagcatcagacggtcgaggctgttgtcggcgatgcagcggttgagcacttcgatcgcgtcgcaatcgtagacccgcaggttggtcaggccttgggtcaacacgccgttgagcagcgcgccgacacctggccggtggacttcaacgccgatgaagtcctggtccggcgcagcggcggccatttccagcagggagtggcccatgccgaaaccgatttccagggaacgcggggccgaacggccaaacacctggtcgtagtccaccggcgcgtcggccaatggcaacacgaacaacggcgtaccttgctccaggcccttttgctggccttcggtcatacgaccggcgcgcatcacaaaagtcttgatgcggcggtgcttggactcgtcgcctgcttccagggtgttcggcgtttcgtttgattcagtcatcaatggctcttacttgatcagaccatccagcggcgaggaggcgctggcgtagagttttttcggcatgcggccggcgaggtaggccaggcggcccgcgacgatggcgtggttcatggcttcggccatcaggatcggttgctgggcgtgggcgatggccgagttcatcagcaccgcatcgcagcccagttccatggcgatggttgcgtcggaggccgtgcccacgcccgcatccaccagcaccgggatcttggcttcttcgaggatgatctgcaggttgtagggattgcagatacccaggccggaaccgatcaggccggccagtggcatcaccgcgatgcagccgatttccgccagttggcgcgcaatgatcgggtcatcgctggtgtagaccatcacgtcgaaaccttccttgaccagggtttcggcggccttgagggtttcgatcacgttggggaacagggttttctggtcggccagcacttccagcttcacaaggttgtggccatcgagcagctcacgggccaggcggcaggtgcgcacggcttcaatggcgtcgtagcaaccggcggtgttcggcaggaaggtgtagcggtccggcgacagcacttcgagcaggtttggctcgccttcgatctggccgaggttggtgcggcgcacggcgaaagtgacgatctcggcgcccgaggcttcgatggccaggcgggtttcttccatgtcgcggtacttgccggtgccgaccagcaggcgggactggtaggtacagccggccaggacgaaaggcttgtcgctacgaacgatgctcatgggaaatcctcgaaatggggtgaggttctgcagaattcaggaagctgcgcgatcagccgccgccgatggcgtggaccacttcgacctggtcgccttcggcgagcgcggtctcggcgtgcaggctacgcgggacgatatccaggttgagttccactgcgacgcgacgcccggtcaggtccaggcgggtcagcagggccgcaacggtttcaccgtcgggcagttcaaaggattcgccgttcaactgaatgcgcatgccacgggccgtcatcgtttttaggggtcggcattctagcccgattgaggttgccggcccaagtcccttggtcaggctgcctgcaaacgccacgccgccaggcccaggaagaaccagccgagcaggaaggcaaggccgccaaacggcgtgatgatcccgagtttgctgatgccggtcagggtcagcacatacaggctgccggagaacagcaggatgccgacggtaaacgagatgcccgcccagctgaccaatcggccaggaatatgcgccgccagcagcgccacgccgaacagtgccagggcgtgcaccaactggtaggtcacgccggtgtggaagatcgccaggtactcagcgctcaggcggtttttcaggccgtgggcggcgaaggcgccaagggcgacaccggtgaagccgaaaaaggcagccaacatcagaaagccacgcagcatgaggaactccagtcagactcatagggcagggtctgtataatggcccgctcaacgggttcggccaagccatctctatgctgcgtctcctcttcaaacgctttctcaacgtcgtcaaatggtttgccatcggcagtgtgctgctggtgctgctgtttcgtgtcgtcccgccgcccttcaccgcgctgatggtggagcgcaaggtcgaatcctggttcgacggcgagcccattgacctgcagcgcacctgggtgccgtgggacgagatctccgatgacctcaaagtggcggtgatggctggcgaagaccaacgcttcccgcagcattggggctttgatttcggcgcgatccaggcggcgatcctgcacaacgagcgcggcggctcgattcgcggtgccagcacgttgagccagcaagtgtcgaagaacctgtttctgtgggccggccgcagttatctgcgcaaaggcctggaagcctggtttaccgggttgatcgaggtgttgtggcccaagcagcggattcttgaggtgtacctcaatagcgtggagtgggacgaaggggtatttggggcggaagcggcggcgcggcatcactttggggtgagtgccaaggggttatcgcggcagcaggccagctatctggcggctgttttgcccaacccacgggtgtggagtgccagtcatccgacggcgtatgtggcgcggcgcgctgcttggattcggcagcagatgggtcagttgggtggagacggttacctggttgaactgaacaactcccgcaaggccccctggtccgactgacacaacaaaaacaaatgtgggagggggcttgcccccgatagcgatggaacagtcaccttgatgttgactgacactctgctatcgggggcaagccccctcccatatttttaggctgcgatggacagtttcagcttgttcatcgcgcttttctcaagctgacgaatccgctcggccgacacgttgtacttctgcgccaggtcatgcagcgtggccttgtcttccgccagccagcgctggtagaggatgtcacggctgcggtcgtccagcacttccagcgcttcatgcaggttgtggttggagttgtcgctccagtccgcatcctccagttgacgcgccgggtcgtagcgatggtcttccaggtagttggccggcgattggaaggcgctgtcgtcgtccgcttcagcagcggggtcgaaggccatgtcatggccggtcaggcggctttccatctcgcgcacttcacgcggctccacgccgaggctttcggccacgcggtgcacttcctcgttgttcagccacgccaggcgtttcttctggctgcgcaggttgaagaacagtttgcgctgggccttggtggtcgccactttcacgatgcgccagttgcgcaggatgaattcgtggatttccgccttgatccagtgcacggcaaacgacaccaggcgcacacccatctcggggttgaagcgctttaccgccttcatcaggccgacgttgccttcctggatcaggtcagcctgggccaggccgtagccgctatagctacgggcgatatgtacgacaaaacgcaggtgggcgagcaccatctgccgagccgcccccaaatcctgctcatagtagagactctcggccagttcacgctcctgctcgggcgtcagcaatggaatgctgttgaccgtgtgcacataggcttccaggttcgcacccgggaccaaggcataagcaggttgcaaagaagtggtcatacgaaaaaacctccgactcacataactcgtgcagtgaagcactgcgaaaattgaccgggaaccgtaggacaagttccctaaaccaccaatacggtcaatacaaacgaaaccacattaatctgacattaactacttcggtgccagctcacgtaaatgacgagcgaccgcaatccacgcaccgatataccccaacaataccgcgccaagcaagagactcagaccatcggctaccggcacgccggccagggcgaaatcactgccgtagagtccggcaagcccgacaaccgcgtcgttcagccagtccaggccaaaagccagcacgccccaggacaaaatcccggcaccgaagccataaagcgcgcccatgtacagaaaaggacgacgcacatagctgtccgtgccgccgaccagtttaatcacttctatctcggtgcgacggttttcaatatgaagacgaatggtattacctatcaccaaaagtaatgcagacaccaacagcaccgtcaggccgaacacaaaccggtcgcccagcttgaggatcgccgccaggcgctctacccagactagatcaagctgcgcctgctgtaccttgggcatctctgcgagtttttgtcgcagggcctccagcgccggcttatcgacttcgttcggcgtcaccagcaccacgcccggcagcgggttctgtggcagctccttgagcgcctcgcccaggccggactgttgctggaactcttccagcgcctgatcgcggctgatgtactcggcatccgccacgccggggatgttcttgatgtcgtcgcgtaacgcttcgccatctttggcactggcgtcgatattcaggtacagcgaaatctgcgctgcgcgctgccaggaaccgcccaggcgctccacattattaagcagcagcgacaaacccatcggcaggctcagggccaccgccatcaccaggcaggtgaaaaagctgccgatcggctgtttgcccaggcggcgcaggctgtcgaccaggctggcgcgatggctctcgatccaggcgcgcagcaaggtgctgaaatccggaccgtcgtcatcatgctcgtgttttttcttcggcggttgcgggtcggccggtttcggcgccacgcgttcggagactttagggctgcgtgttgcactcatacgccggcctccccgtcaccgatcaggcggccgcgttgcagggtcagcatgcgatggcgcatgcgtgcgatcagtgccaggtcgtgactggcgatcagcacgctggtgcccaggcggttgatgtcttcgaatacgcccatgatttcggccgccaggcgcgggtcaaggttaccggtgggttcgtccgccagcagcagcgccgggcggtggacgatggcgcgggcgataccgacgcgctgttgctggccggtggagaggtcgccggggtacaggtcggtcttgtccgacaacgccacgcgctccagggccgaatccacgcgcttgacgatctcggccttggacagcccgaggatctgcaacggcagcgccacgttattgaacacggtgcgatcaaacaacagctggtgattctggaacaccacgccgatctggcggcgcaggaatggaatctgcgcattgctgatggtggccaagtcctgacccgccagcagcaacttgccagtggtcgggcgttccatggccagcagcagccgcaacaaggtacttttgccggcgccggagtgcccggttacaaatagaaactcgccgcgccgtactcgaaagctcagctcatgcaagccgacatgcccgttggcatagcgtttaccgacctgttcgaatcgaatcatgaacgctcccgctcggcaaacagtgcctgtacaaagggttcggcttcaaaggtgcgcagatcgtcgatgccttcaccaacgccgatataacgaatcggcaacccgaactgtttggccagggcgaagatcacaccgcccttggccgtgccgtcgagcttagtcaatgccaggccggtcagttgtaccgtctggttgaattgtttggcctggctgatggcgttctggccggtgccggcatccagcaccagcaggacctcgtgcggcgcgtctgcgtcgagcttgccgatcacccggcgaacctttttcagctcttccatcaaattgtctttggtgtgcaggcgaccggcggtatcagcgatcagcacgtcgatgttacgggccttggcggcctgcacggcatcgaagatcaccgaagcggaatcggcgccggtgtgctgggcgatgaccgggatcttgttgcgctcgccccacacctgcagctgttccaccgcagcggcacggaaggtatcgccggctgccagcatgactttcttgccttcggactgcagcttcttggccagcttgccgatagtggtggtcttgccggcaccgttgacgcccaccaccaggatcacgaaaggcttcttcggggtgatcaccagcggcgcttccaccggcttgagcatcgcggccagctcggcctgcagggatttgtacaacgcgtcggcgtcggtcagctgcttgcgcgcgaccttctgggtgaggctctggatgatcacggcagtggcttcaacgcccacgtcggcggtgagcaggcgggtttcgatgtcttccagcagttcgtcatcgatgaccttcttgccgaggaacaggctggccatgccttcgccgatactggcgctggttttgctcaggccttgcttgaggcgggcgaagaagccggtcttgctggtttcggcaggggcgacgacgggctccggctcgacaaccgcaggcacggccacctcggccacagccggaatcggcggggcgatgtgctcagcctgcacatcttcgaccagcgccacgggctcttcagccaccggcagttccggccacggtttgtgctcgggttccggctcaggttccgggaccgcctcgacgaccggctgcaacaccggctcggccatcggcaacaccaccggcgccggggtttcggcaaccggttcggcttctactatgggttctgggataggttcaggcagaacctgcggctgttcgtcgacggtttcctgcggctttttgcgcagccatccgaacaggcctttcttctcgccagccgcagctggggtcttcttgtcgtcgttggaaccaaacatggagacggctatctcaaggtagcgacgcgccaaggggcgcgtcggtaaataaaattcgatgcgtaacagactgttttttagccagctcgttcatgcgcaacattttgtaaggcctaaatagggcctaaacaagactgccgcagtggccgtccgtaaatccgaccagtatcctagcacctcctcgcccgccgacgctaagaccaagcgggcagcccaacaggtttaaaaacgaatgaatgctctagcccgccgcgccgcaggcctgctgttcagcacagtttgtctgcctctttcagccatggctgccgacccacaacccacccatgaattcaccctggacaacggcctcaaggtggtcgtacgcgaagaccatcgcgcgccggtggtggtttcccaggtctggtacaaggtcggttcgagctacgaaaccccgggccagaccggtttgtcccacgccctggaacacatgatgttcaagggcagcgccaaggtcggccccggcgaagcctcgctgatccttcgcgacctgggcgccgaagagaacgccttcaccagcgatgactacaccgcttattaccaggtgctggcccgtgatcggctgggcgttgccttcgagctggaagccgaccgcatggccagcctgcgcctgccggccgacgaattcagccgcgaaatcgaggtaatcaaggaagagcgccgcctgcgcaccgacgacaacccgatgtccaaggcctacgagcgcttcaaggccatggccttcccggccagcggctaccacacgccgaccatcggttggatggccgacctggaccgcatgaaagtcgaagagctgcgccactggtaccaatcctggtacgtcccgaacaacgccaccctggtggtagtcggcgatgtcaccccggacgaggtgaagaacctggccaagcgctacttcggcccgatccccaagcgtgatgtgccaccggccaagatcccgatggaactggccgagcccggcgagcgcctgctgacgatgcatgtgaaaacccaattgccgagcgtgatgctgggctttaacgtgccgggcctggccaccgccgaagacaaacgttcggtgcaggccctgcgcctgatctcggccttgctggacggcggctacagcgcccgcatctcagaacagttggagcgtggtgaagagctggtttccgccgcctccaccaactacgacgcctacacccgtggcgataccctgttcatgctgagcgccacgccgaatcagcagaagaagaaaaccgtcgcccaggcagaagccggcctgtggcgcctgctggaagagttgaaggccaagccgccgaccgccgaagaactggaacgcatccgcgcccaggtcattgccggcctggtctaccagcgtgactccatcaccagccaggccacggccatcggctccctggagaccgtcggcctgtcctggaaactgatggacacggagctcgccgacctgcaaagcgtgaccccggaagatatccagaaagccgcgcgcacctatttcacccgcgaacgtctgagcgtcgcccatgttttgcctgaggagaccgctcatgagtgatcgcaaaagcagccgcctgatcttccccggcctcgtcgtcgttaccctgatcgccgccagcgccgtgtacttcctgcgccccagcgactccgtcgccagcccggcattggaaaaagcccaatcgagcaaccagctgcaatccctggcggaactggacggcaaggcgccgaccaaccgcaagctcgacgttcagacctggaccaccgccgaaggcgccaaggtgctgttcgtcgaagcccatgaactgccgatgttcgacatgcgcatcctgtttgccgccggcagcagccaggacggcaacgtaccgggcctggcgctgatgaccaacgccatgctcaacgaaggtgtaccgggcaaggacgtgagccagatcgcccgtgatttcgaaggcctgggcgctgacttcggcaatggcgcttaccgcgacatggcgctggtgtccctgcgcagcctcagtgacagtagcaaacgcgacgccgccctgagcctgtttgaccaggtgatcggcaaaccgaccttcccggccgactccctggcccggatcaagaaccagatcctcgccggcttcgagtaccagaagcagaaccccggcaagctggccagccttgaactgttcaagcgcctgtacggcgatcacccctacgcgcacccgagcgaaggcacgcccgaaagcgtgccgaagattaccctcgcgcagttgcaggcgttccacgccaaggcttacgcagcgggcaacgcggtgattgcggtggtgggtgacctgacccgcgccgaagccgaagccatgacggccaaggtttctgcatcgctgcccaagggcccggcgctggcgaagatcgcccagccgaccgaacccaaaccgggcctgagccgaatcgagttcccatccaagcaaacccacctgctgttcgcgcaactgggcatcgatcgtgccgacccggactacgcagccttgtccctgggtaaccagatcctcggcggcggcggtttcggcacccgcctgatgagcgaagtgcgtgaaaagcgcggcctgacctatggcgtgtactccggcttctcgccgatgcaggtgcgcggcccgttcatgatcaacctgcagacccgcgcggaaatgagcggcggcaccctgcgcctggtcgaggacgtggtggccgattacctcaagaccggcccgacgcaaaaggaactggatgacgccaaacgcgagctggccggcagcttcccgctgtcgaccgcgagcaatgccgatatcgtcgggcagttgggcgcgatgggtttctacaacctgccgctgacctatctggaagatttcgtgaaacaatcccaggccctgaccgtagagcaggtcaaggctgcaatgaacaaacacttgagcgccgacaagatggtcatcgtgaccgccggcccgacgattgcgcaaaagccactaccgccccccactgataaacccgccgagcagccgctcggggttccggagcattaatggccagttcatctcgcccgaaaaaacctgtccacaacgtgcataacggggtgggccagctgcgcatcattggcggcgaatggcgcagccgcaagctgagcttccccgacgtcgtaggcctgcgcccgacgccggaccgcgtgcgtgaaaccctgttcaactggctcgcgccgtacatcgccggcgccaaggtactcgacccgttcgccggcagtggcgcgctgttcctggaggcgctgtcccgtggcgccgccctgggccaggcgctggacgccagcaatgtggcggtgtccagcctcaaggaacacctgggcaccctgcgctgcaccaccggccaggtgcaaaccgccgacgcgctgcgctatctcgaaacccagccggccagcgaattcgacgtggtgttcctcgacccgccgttcaaccagaacctgctgccgagcgtgtgcgcgttgctggaagaacgccaatggctggcagcggattcgtggatctacactgaaagcgagaccgcgccttctaccctgggcttgccggccacctggcggctacaccgggaacaaaagtccggacgggtgtattacgcgttgtggcaacgcagcgccgcctgacctctgtttgtggcgagcgggcttgccccgcgttgggctgcgnnnnnnnnnnnnnnnnnnnnnnnnnnnnnnnnnnnnnnnnnnnnnnnnnnnnnnnnnnnnnnnnnncgcagcccaacgcggggcaagcccgctcgccacagttaaatgcatccgcagcagagcgtgtcatgaccccttcttccgacctgttcacccccgccttcggcctcggcaacccccacctgcagacactgtgggggccgctgtggcgccccaccacccacatcgaacgccaacgcgaacgcctgtggctggacgacggcgacttcctcgacctcgactggcatggcccccatgacgcgcaagcaccgttggtgctggtgctgcacgggttgaccggttcctccaactcaccctacgtggccggcctgcaaaaagccctggccgcgcaaggctgggccagcgcggcgttgaactggcgcggctgctcgggcgaaccgaacctgttggcgcgcagctatcactccggcgccagcgaagacctggcggcggcgattgcccatctgcgggccaagcgaccgctggcgccgctgtatgcggtgggttactcactgggtggcaatgtgctgctcaagcatttgggcgaaaccggcgaggcatccgggctgcaaggcgcggcggcggtgtcggtgccgttccgtctggaccaatgcgcagaccgtatcggcctgggcttttcgcgggtctatcagaagcatttcatgcgggagatgctggcgtatatccgcgtcaagcaacgccgttttctacaggacggccgggcggaagggttgaagacgcttgaagccctgggctcgttggagaagatgcgcacgttttgggacttcgacggccgggtcaccgcgccgttgcatggtttcctgagtgccgaggactattaccgccgcgcgtcgagccgctattacctgggtgatatccgcacgcccaccctgatcatccaggccgccgatgacccgtttgtgtttgcccacagcctgcccgaggccagtgagctgtcggactgcaccgagttcgaattgctggccaagggcgggcatgtcggttttgtcgatggaacgttgaagcgccccggttactatctggagcgccgtattccggcctggttactcagtcgccggtagcgatggcccgcgccggatcggtgatccactcgctccacgaccctgcatacaacttgcccaatgggtaacccgccaggctcagggcgaacaggttatggcacgccgtcactcctgaaccgcaatacgccaccagctcatccggcgagcgcccctgtaatttttcggcgaagcgttgcttgagctgctcggcgggcaagaagcggccgtccggacccaggttttcgttgaatgccgcacactgcgccccagggatgtgcccggcaatcgggtcgatgggttccacttcaccacgaaagcgcggctgggcgcgggcatcgatcagggtcaacccgggttggcccaggcgtttttgcaggtgctcggcatccagcaccaggcgattgtccggcgtaccgacaaaggtgcccggctcaaccaccggtgcgtccaggctcagcgggaacccggccgcatgccaggccttgaggccaccatccagaataaagacgccatcacgcttgcccagccaggccagcaaccaccaggcccgtgcggcataggctccggggccgtcgtcatacaacacgatatcggtgtcggcgttgatcccccaggcacgcaattgctcggcgaaggcatctgcctccggcaacggatggcgaccggtcacacccttggtcaccggcccgctgaggtggcgctccaggtcagcatactgcgcgccctcgatatgcccttcggcatagctgcagagcccgtagtccgggtcttccaaggcaaaacggcaatcgaggatcaccagcccggccgacttctggcgctcggccagttgctgggggctgatcaattgggcgagcggcatgacggactcctatgagcagattcgggaaaggtcctacttcacttcttccaatgcctgattcaacggcacgtaaaattctttgaacaaggcatcgacggcctccttcgcctggggcgtgacaaaccccgcctccagcaccagcacctgatacaccccgcgcttgatcgcctcggcgctcaaatgtgcagagttttcattggtggtgcacagaaagcgcacccaggaggtgaggatgatccaggcattgagggtcagggcttcggtttgcaccgggtccatattgaggatgccagcgtcgacaaacccttggtaaatggcgccgccctgggtcaggcagcgctgggaaaaacgccggtagccggtggccagttccgggtcgctttccagcaggtgttcgaggtcgcggtgcaggaaacggtagcgccacatgccggccagaacggcctgcaggtagaagcgtttgtcttcgacggtgacggcgcggccttggggcgggcgcaggaaactgtccaccagggcttcgtattcgcgaaacagcacggcgatgatcgcctgcttgttggggaagtggtagtacaggttgcccggcgaaatttccatgtgggcggcaatgtggttggtgctcacactgcgctcgccctgctggttaaaaagctccaggctggtttgcacaatgcgctcgctggtctttactcgtggtgccataggggatcagcttctgtacacgtgataaggcatcttacggcctatccttgcacggataaaaccggatgttgctgcaatgttatttgacaatttagagtaacgactctaaaaatccaggcagacctataacaatcgggaacgccgccatgtctgccaacgttgcctatctgcaagattcccaggcactggaccagctccagcacctgttcgatacccagcgccgcgcctacgccgccaacccgatgccgccagccacgcagcgccagcaatggctcaaggccctgcgcgatctgctcagcgacgagcgccaggcgctgatcgacacgatcagccaggacttcagccaccgcagtgccgacgaaaccctgttcgccgaactgatgcccagcctgcatggcattcactatgccagcaaacacctcaagggttggatgaaaccttcccggcgggctgtaggcattgccttccaaccggcttcggccaaagtcatctaccaaccgctgggcgtagtcggggtgatcgtgccctggaactacccgttgtacctggccatcggcccgctggtcggcgctctcgccgccggcaaccgggtgatgctcaagctcagtgagtccacacccgctaccggcgaattgctcaaggcgctgctggcgaaagtcttcccggaagacctggtgtgcgtggtgctgggtgaagccgaggtaggcatggcgttttccaagctgcccttcgaccacctgctgtttaccggcgccaccagcattggcaagcatgtgatgcgtgcggcggccgaacacctcacgccggtcaccctggagttgggcggcaagtcgccggccatcgtgtctgcggatgtaccgctcaaggacgccgccgaacgtatcgccttcggtaaggcattgaacgccgggcaaacctgcgtggcgcccgactatgtattggtgccggaagaccgcgtcgacggtttcgtcgaggcctacacccaggctgttcgcgggttttatccgaccctggccgacaacccggactacaccgccatcatcaacgaacggcaactggcccggctgaatgcctacgtcaaggacgccaccgacaagggcgccaccctgattccgctgtacgaccagggccaggcgcggcgcatggcccacagcctgttgctgaatgtcagcgatgacatgaccgtgatgcaggacgagatcttcggcccggtactgccgatcgtgccgtatcgcggtatcgaccaggcctttgcctatatcaaccaacgccctcgcccactggccctgtactacttcggctacaacaagcgcgagcaggaccgcgtgctccacgaaacccactccggcggcgtatgcctgaacgacacgctgctgcatgtggctcaggacgatatgccctttggcggcatcggcccgtcgggcatgggccactaccacggccacgaaggcttcctgacgttcagcaaagccaagggcgtgctggtgaagcagcgcctgaacgcggcgaagctgatctacccgccctacggcaaagctatccagaagttgatccagaagctgttcgttcgctgaaaccgccacccacgggataacaataacaatgaaccctagcctgactgattcacccgcgctgtcgcggcgcggcgtcttgaagattggcctgtgcgccagcgccttcctggcgaccgccgggttgggcgccagcctcagcggttgctccagcagcacgccggccagcggctttgccatgctgcgagccagtgacctgccgttcctgcgcgcggtgatcccggtgctgctcgaaggcgtggccagcgcccaggaagttgccagcgggattgaagacacccttaagaagctcgactacagcctgcaacacctgtcgccggagatgttcaagctcacccagcaactgttcgacgtattgggcatgggcgtcacccgtgggccgttgaccgggatctggggcagttgggaaaacgccagcggcgagcagatacgcaacttcctgcaccgctgggaaaacagctacctgaacctgctgcgcatgggccagggctcgctgctcaagctggtgatcatggcctggtatttccagccggcgtcctgggcgcattgcggttaccccggcccaccgaagatttgattcgccgcccccccataaaaacaagagacgaccctgatgcccgtacccgacctgttccgcgacggcatggcccgtggctggaaaacccacaatggcgccgcgctcgataacgacctgaccctggaagccgatgtggcgatcatcggcagcggcgccggtggcggcaccactgccgagattctcagcgccgccggctacaaggtgctgctgatcgaagaaggcccgctcaagaccagcagtgacttcaaactgctggaagacgaggcctacgccagcctgtaccaggaaggtatcggccgcatgagcaaggacggcgccatcaccatcctgcaaggccgggcggtgggcggcactacgctgatcaactggacgtcgagctttcgcaccccggacgccaccctcgcccactgggccagcgaatacgcggtgaaaggccacagcagcgccgagatggcaccgtggttcgaaaagatggagcagcgcctgggcatcgcaccgtgggccatccccccgaatgccaacaacgatgtcatccgcaaaggctgcgaaaagctcggctacagctggcatgtgatcccacgtaacgtgcgcggctgtttcaacctgggttattgcggcatgggctgcccagtcaatgccaagcagtcgatgctggtgacgaccatcccgtccaccctggaaaaaggcggagagctgttgtacctggcccgcgccgagcgcctcctctataaaggcgacgctatcagtagcctggaatgcgtggcgatggacgagcgttgcgtggcgcctaccggacgcaagatcaccgtgaaggccaggcattacgtgctctccggcggcggcatcaacagcccggcgctgctgatgcgctcggatgcacccgacccgcactcgcggctaggcaagcgtacctttctgcatctggtgaacttctccgccgggctgttcgacgaggtgatcaacccgttctacggcgcgccgcagtcgatctattccgatcactttcaatggcaggacggcactaccggcaaaatgtcctacaagctggaagcaccgcccctgcatccaggcttagccagcaccttgttcggcggctatggcacgcagaacgccttggacatgagccaattgccgcatacccacgccatgcttgcgctgttgcgtgacggttttcaccccgacagccagggcggcagcgtggatttacgcggtgacggtacgccggtgctcgattatcaggtctccccctatgcctgggacggcctgcgccgggcgtttcacagcatggccgagatccagttcgcggcgggcgccaagtcggtcaagccgctacaccacgacgcgcggttcgtgaacaccttggccgaggcacgccgtgtgattgacgggttgaacctggaactgcaccgaaccacgctaggcagcgcccatgtgatgggcggctgcgccatgggtgaagacccgaaaaacgcagtggccgacagcctgggtcgccatcaccagttgcgcaatctgtcgatccacgatggttctctattccccaccagcattggggccaatccacaattatcggtgtacggtttgaccgcccaactggcgacagcgttggccgaacgtctgaaaacagcgtgaaaaaacacagtattcgccgtgtctatagtgctttcttctgcataagttgactttcccgaccgggacggctgcgataccatccggttccccaacggactccgccaggacgacgcgatgaaccgagtgttgtacccaggtaccttcgacccgattaccaaaggccatggcgatctggtcgaacgtgcctcacgcttgttcgaccatgtgatcatcgcggtcgcagccagccccaagaaaaacccgctgtttcccctggaacagcgcgtggagctggcgcgtgaggtcaccaaacacctgcccaatgtggaagtggtgggcttttccacactgctggcgcatttcgccaaggagcagaatgccaatgtgttcctgcgcggcctgcgtgcggtgtcggacttcgaatacgaattccagctggccaacatgaaccgccaattggcgccggacgtggaaagcttgttcctcacgccgtcggagcgttattcgttcatttcctcgacgttggtccgtgaaattgccgctttgggcggagatatcaccaagttcgtgcacccggccgtggcggatgcactgaccctgcgcttcaagaaataagcccccaatcggcgcctgctcgcactgcgggcgccaatgcggcacaattgcgcgcattagttttcagatgccttggctgacagccctggcaggagtttccatgtccctgatcatcaccgacgattgcatcaactgcgacgtctgcgaacccgagtgcccgaacgccgcaatttcccagggcgaagagatctacgtgatcgacccgaacctgtgcacccagtgcgtcggccactacgacgagccgcagtgccagcaggtttgtccggtggattgcattccgctggatgaggcccatccggaaacggaagagcagctaatggccaagtaccggttgattaccggtaaagcctaagactggcacttggggcaaaacacactcgcccgctgtcccagcaccacattgcgcaattcgctgccgcagaccttgcacgcctcgccgccccggccatagacgaacagttcctgctggaaataccccggttgcccgtcgccgccgataaagtcgcgcaacgtggtgccgccacgctcgatggcagccgccagcacgcgcttgatctcgatcgccagcttcaaataacgtgctcgtgagataccgccggcctcgcgacgcggatcgatccccgccgcaaacagcgcttctgtcgcgtagatattgcccacacccaccaccaccgcgttgtccatgatgaacggcttcaccgccatcgaccgcccacgggacagctggaacagacgctcaccgtcaaacaggtcggtcagcggctccggccccaggcggatcagcagttcatggttgtgcgggtcctggctccagagcatcgcgccaaaccgccgagggtcggtgtagcgcaaggccaggccggactccagttcgatatccacatgctcatgcttggccgctggcatgccaacctctaccaggcgcaagttgcccgacatgccgaggtggctgatcaaggtgcccacttcggcattgatcaacaggtacttggcccgccgctccaccagcacgatgcgctggccggacaggcgcacatcgaggtcttccgggatcggccagcgcaagcgtcgctcgcgcaccaccacgcggctgacccgctggccttccaggtgcggcgcgatcccgcgccgggtggtttcgacttctggtaactcgggcatgtgtacctcttgaaggaaggatcagtgggcgcccagttcgcggatcgacaacttcatgctctcgaagtcgtagtccgacagccccacgtaatccagcaccaggtggccgatggcgttccactcatggtccaccgcctggttacccagcacgcggtaggacgagcagatgtgctcggccattttcaggatcgccagcaggttcttcaattgcgaattgcgcgctgactcatcactgaaaatcgccagggcgttgtggtggttggcgatggcgtcagtcacatgctgcggcaggcgccaggatttcgcggtgtagtagccaaccaccgcatggttggtgttgaacgcgttgttctcggtatcgaccacgcggcaatcggggccggcatttgcatacgcctgctccagcaccgacatgtagttggggaagcgcttgagcatcaacggcacgccacagtcgtggaacaggcccagggcataggcctcgtccaccgcctgggcgccggtgcgcttggccagggtgaggcaggtcatggccacatcctgggcggtgtcccagaagcggttgagggtgacgatggtgtcgtcgctcatctcgcctttgatcgacagcgcattgatcaggttgatgatcgagcggctgcccagcaggttcaccgcgcgctggatcgaagcgatcttgttactcaggccgtaatacgacgagttgacgatcttcagcaacgcgccggacaggcccgggtcctgggagatcagccgtgcgatcacttccaggtccggatcgggcatgtattgctccatctgcaaatccaccatgatttgcggctggggcggcacgctgatgccttgcagggcctgttggatctgttcggcggaaagctcttgggacataagtacacactctgggctaggcggggattctaacccctaagcaaacctgaccgacacccaaatgcccgattgaaaccggactaaatgtgggagggcgcttgctcccgatggcatcaccgccatacgtcagatacaccgcgccgcctgcatcgcgggcaagcccactcccacatgaaccgcgccgcaacaggtatactcccgctcttttttccggagcgacgtcatgtccctgccaagcctgcgtctcaaagccaacgccgatcgtcgtttgcgcaacggccacctgtgggtctacagcaacgaaatcgacgtggccgccaccccactccacggcttccaggcgggcgaccaggccatcctcgaagcggccggcggcaagaccctgggcatcgtggccatgagcccgaacaacctgatctgcgcccgcctgctgtcgcgcgatatcaagttgccgctggacaagtcgctgctggtgcaccgcctgaacgtcgccctgtcgctgcgcgatcgcctgttcgacaagccgttctaccgcctggtctacggcgattccgacctgttgccgggcctggtggtcgaccgtttcggtgacatcctggtggtgcagatcgcctcggcgaccatggaagcgcataaagaagacgtgatcgccgccctgacccaagtgctcaagccaagcggcatcctgttcaagaacgactccgccgcgcgcgacgccgaaggcctcaaccgctacgtcgaaaccgtattcggcctggtgccggagtgggtggcgctggaagaaaacggcgtgaaattcgaagccccggtaatccagggccagaagaccggctggttctacgaccaccgcatgaaccgcgcccgcctggccccgtatgccaagggcaagcgcgtgctggacctgtacagctacatcggcggttggggcgtgcaagccgcagccttcggcgccagcgaagtgttctgcgtcgacgcctccgccttcgccctcgacggcgtggagcgcaacgccgcgctgaacggctttgccgagaagatgacctgcatcgaaggcgacgtctttgaagcgttgaaagaactgaaagccagcgaagaacgcttcgacgtgatcgtcgccgacccgccggccttcatcaaacgcaagaaagacatgaaaaacggcgaaggcgcttaccgccgcctcaacgagcaagccatgcgcctgctcagcaaggacggcatcctggtcagcgcgtcgtgctccatgcacctgccggaagacgacttgcaaaacatcctgctgaccagcgcccgtcacctggaccgtaatatccagatgctggaacgtggtggccagggtccggatcatccggtgcacccagcgattgccgagacgcggtatatcaagagcattacgtgccggctgttgccgaatagctgatgccgttggcctgtaggggcctccgggttcctacaggctttcaggaagtttcgccccgcaccaggttttgactttcctctgctcaggctcgatcctcgaccccctcacggaatcgaggctcgcgcatgtcgacggcaatcacacaggctgaaaaacccttcattgttttctggctgatgaccatgaccctgctgggcgtcttcccgcttgacgtcgtgctgccctcctttcccgccctggcggaacacttctccacctccaccacccaggtcgcccgctcggtcagcctgttcgccattggcttttcatgcgccatgctgttgatcggcccgctgtccgacaggatcggccgcaagaagctgctactggccagcatgctcgtcgcaatcatgggtgcggccgggtgtttaaccgccagcacgactgcccaattcctgttctttcgcgtcatccaggccatgggttgcggcggtttcatactgtcccaagcgttggtgcaggaccttttcttcggcagagaacaagagcggttgcggatcgccatggctacggccgggggaattttcatttcggtttccccgctgctgggcgcgtggctgcaactgcacggggggtggcaagccagcttctatgtgtttatagcgctctgtgcagccaccctgatcatggctcaccggctactccatggcggcttgcctcaagcggcaccaagccgccaaagcatgttcaaggcctacacaaaggtcttcgccagccggcacttcgccagctatgccacgatctccgcgattaccttcgcctgtcatttctcgttcatcgttgtgtcaccgctgattttcatggaccagttgcagctgacgccccacgaatactcgttgaccctgctcctctacggcgccgcttatgtactgggcggtgtcagtgcgggcttcttgcacaagcgactaccggccgcgacccagatggccaccgggctggtgctgatcgcgatctcgggcatcgtcatgctggtcctcgcctatcagttcggcttatcaaccccgacggtgctggtgcccatgctgctctgcacagcaggcacgaccatcacccgccccatttccaattccaaggccatgagcttgtttccggacaatgcagggacggcggcctcagcggtggcggcagtgctattcattgccggtggtcttatcagtgcattcatcagcacctttacccaccatctgagtaccgcgctgggtctgtgctttctgatgctgagcgccgtcgccctggccctgaacgcatgggcgcggcgtcacccgcacgtcccgtagccgctatcttcacggtttcggtcattccctcccgccgccagcggtgtagaatcggccctattcatcgccagtcatcccccggcgggtttatgagctcgaggcccaagcacgcggcgatcccgcgacgcgagtggcaacttccggacacacggccatttttcgggtgttccagtagtgaaatagaagctcactcccctttagtacttgattagccgcccggagtgctccatgccagattaccgctcgaaaacatccacccacggccgcaacatggccggcgcgcgcgcactgtggcgtgccacggggatgaaagatgacgacttcaagaagccgatcatcgcgattgccaactcgttcacccaattcgtacccggccacgtccacctcaaggacctgggccagctggtcgcccgcgagatcgaacgcgccggcggtgtcgccaaagagttcaacaccatcgccgtggatgacggcatcgccatgggccatgacggcatgctgtattccctgccgagccgcgagatcatcgccgactccgtggagtacatggtcaacgcccactgcgccgacgccatcgtgtgcatttccaactgcgacaagatcacccccggcatgctgatggccgccctgcgcctgaacatcccggtgatcttcgtgtccggcggcccgatggaagccggcaagaccaagctcgcttcccacggcctcgacctggtcgacgccatggtcatcgccgccgattccagcgcttctgacgagaaggtcgcggaatacgagcgcagcgcttgcccaacgtgcggctcgtgctccggcatgttcaccgccaactcgatgaactgcctggtggaagccctgggcctggccttgccgggcaacggctcgacactggccacccacagcgaccgcgaacaactgttcctggaggccggccgcaccatcgtcgagctgtgcaagcgctactacggcgagaacgatgagtcggtgttgccgcgtaacatcgccaacttcaaggcgttcgagaacgccatgaccctggacatcgccatgggcggttccaccaacaccatcctgcatttgctggccgccgcccaggaagccgagatcgcgtttgacctgcgcgacatcgaccgcctgtcccgccacgtgccacaactgtgcaaagttgcgccgaacatccagaagtaccacatggaagacgtgcaccgcgccggcgggatcttctcgatccttggctcgctggcccgtggcggcctgctgcacaccgacctgccgaccgtgcacagcaagtccatcgccgaaggcatcgccaagtgggacatcacccagaccgacgacgaagccgtgcacaccttcttcaaggccggcccggccggcattccgacgcaaaccgcattcagccagtcgacccgttgggacaccctcgacgacgaccgtgaaaacggctgcatccgcagtgtcgagcacgcctactcccaagaaggcggcctggccgtgctgtacggcaatatcgccctggacggctgcgtggtgaaaaccgccggtgtggatgagtccatccacgtgttcgaaggccgcgccaagatctacgaaagccaggacagctcggttcgtggcatcctcgctgacgaagtgaaggaaggcgacatcgtgatcatccgctacgaaggcccgaaaggcggcccgggtatgcaggagatgctgtacccgacgtcctacctgaaatccaagggtctgggcaaagcctgcgccttgctcaccgacggccgcttctccggtggtacctcgggcctgtccatcggccatgcttcgccggaagccgcagccggtggcgcgattggcttggtgcaggacggcgacaaggtactgatcgacattccaaaccgctcgatcaacctgttgatcagcgacgaagaactggcggcacgccgggtcgagcaggacaagaaaggctggaagccggtggagaagcgtccgcgcaaagtcaccaccgcattgaaagcctatgccctgctggccaccagtgccgacaagggtgcggtgcgtaacaaagcgatgctcgacggcctgtaagcctcgcccatgaaaatgccccgccaagtgcggggcatttttttgcctggcgttctgacgctgtagtttttcatacgccggccgataacaggcgcatctgtattctcaaggaccttacccgcatggatgctcgctcttccgctctacgcccagctgcatgggcgctttccctattggcgttggccggttgcagctcgctgcaaaagcctcaggtggacccaggcctggcactcttcaacgaagccatgacactgccggcgctcgactacaccatcctgcgcaacggcgacagagtcgcgtactccgtcgatttgcagcaaaacccgatctctgtgcagttcgacgcctattgcacacaaggtcctggaaggatgctctaccccacgcgcacgggcctgcgggcatttactccctcaccggcaacaggcgtcgacctgccggcggcacaggcccaacaactgcagcaaagcgctcaattgcagagcgtatgcaaggcacgtcccgtgcccgactggcgggtgctgcaaacctctgccgatcagggctggctgctgatcgaccgtaacagcgtgcagcagcaaggcagtcagatatccgcctgggtcgcacaggattacctgcactatcaggtcgccaagaacgcatcgttgtttactcaacggcaggagcggctgaccctggattgcacacaacgcaccattacgttgatgagccagttcaacctcgatgaaacgcgccagatgatcaacggcgaaatccgtcgacaattcaagccgcaagccttggagcaagcttccggcgaacatgcccagctcttcaaggctctgtgccaggcgccgatggagctggcccagttacccgctttcaaggcgcgccaggcattgccacccgctgccagcgcaacgaatgccaacccagccgtactggcggccatccgagcgctcggcctgcctgcgccaacccgcaccctgagcgagctggcctacgactatgacgccgtgctcttcaacaacacccgcgtgggcgaccagaccaaacagacattcatcagtgtcgacaacgcatcgggtcagacgctggtacaaacacgcgactcggcacttggctttaaccaggagctgaccttccaaggcctgtttgatctggacagccaaggtctcgaccgcaaaaccggcagggacaaggtgaagacccgcctcttggttggcctgagctttcaaggcgattggcgtaacttgcccctcgccagtgaggtgggctacacccagacatggtcaaaatccatcaaccccgatggcagtccttcgccagagaacagcgagccaagaaccgtgacctgcaaggtcgctcgggaaatcccggctgccaccctcaccccggacctgaagggacaagccaaggtactcgactgcgttcagatgaaaggttggacttatcaggcagcctacctgagcgactatgggctgttcatcaaactgcatgagaacgcgttggttgcgcaatggaactggcatttgaaatcggtgaagtgaccccttgtataggcgccgggttctagaactgcggcttgtacgtcacgctgaacatcatgtttcgcgggtcgccgaagtagttgttgcctaccaactggctgtaggacgggatgtagtaacgcttgtccaagaggttgttgaagttcaccgccaaggtgacttcatcactggcatcgtaggcgactcgggaattgaaaattgcaaagccggcctggccaaagttgcggtcaaagctggtggtcgccgtctgtgcattgacccctgcacccaggctgacacggttgaaatcccccggtagtttgtaatcgccccagatccgcagcatgtgcttgggcaccgccgtactgaagaccttacccttcagttcggtgtctttcaaaaacaccgtggtgttgtaggtatagctactgctgacctgcaaacccggcgccaattggccgctgacctcagcctccagcccctggctgcgcaccttgcccgaggcggtggagcagtaccagccactgcaggcgtttggtccatcgatatcggtgctgaagtcagtgacggcgcggttttcgtggatatagcggaacagcgcaagggatgtattgagacgtccatccagcaactcccccttgatccccacctcatagttgcgcccttcgatcggcggcagaccggtcttttgctgggtcaactgggtttgcgggatgaacacctccgcgtagctgccatacaccgaccactggtcgtccagtgcgtacaccaggcccgcaaagggtgtgaccttgccattgctcttgaccgagtttttttcaccaccctcctgatactcacgggcatagtagttgtcttggtcgaaggcgaagtcgtaccaactggtacgagcgccgaggatcaatgtcagaggctccgtcaggttgatccgccaggtgccgtaaagacctttttgggtgatgtcataggtgctcaaggccaagttggcgcgatcagcaatgctgttataggtcggttgtggtcggtgatggtcgatggcaccgatatcggctcccggcgtgaacgcacgggcatagccgtcatccgtgttgtacttggaatagttgccccccagcaccaggctctgcttgaacgacagcgcttcaaaatctccgctgacataggcgtcgaacccgcggttcttgccatagaaatctgtggagtagtcagcgtagttaccgctgcgcgttgagccgaccggcaccgcacccacgataaattgataagtggcttcattggattcattcatcgccagcgcggaggcgttgaatttccagtgatcgttaaagcggtgctcaagatccaggtataccgccgtctgatcgttgaacgagcggttccaacttgctcccgtataggtcgaacgtgacacatccaatgcactgccatcggtgtgacgcggcaaggcgatcaaatacggacggccatggctctttttattgctgaaaccgacccccagggtcgtgtcatcgtccaagtcgaagtccagcgcgccgtacacggtctgctcccaattccacacgtagtcggtgaaggagtggcccttctcatagttgaccacggcgcggccacggatcgtcccggcctcgttcaatgggccgcccacgtccgcctgggacgcataccggtcccaactgccagccttggcgctcaaggttacagtcggtgcagcctggggacgcttgcgcaccagattgattgccccgcccgggctgttggcgccttgcagcaggccagcagcaccacgcaggacttccatgcggtcgtagatcaccatgttctcggtgatgtagctacccaacgcatacacgttacggggtaccggcacgccatcgtattgcagcgattcaatctcgaagccacgcgcaaacatgaacatcccgggccctggcgacttgaccgacgccatgcccggcaccgcttcaatcgcttgggtcagggtggttatgttctggtcatccatcgctttgcgggtcagcacactgaccgattgcgggatgtccttgagcttttgcgtgcccttgccgatggtcacggctccggtggtgtaagaaccgctgccttcggtggtcgtccccaagtggtcagcgctgatggtggtggcgccgacttcgagggcactgccagtgtctacgcgcttttccagggtgacggtgtcggcattgatgaacgccgcgctcagccctgtacctcccagcagcaagcccattgcctcgcgctgccccaagtgaccgctgacacctggcgacaccagcccctgggtcaactcaccattcaccagcacctgcacccgtgtcaccgccgaaaatgccgccagcgcaccgtccaggctctgccccggaatgtcgaatcggtaggtctgggcctgggtggtttcggcggcctgcaggtacagcggcgcagtgccgcaggccatggaaatggccagtgccagcaagggccgtgcggcgaatcggtgtgccatggatagtgctccccggtgcaaaaagtctgtgatcggcgccgcactacttgagagtgcttactatttacgcctcagtgatcaaggacgatggcttgcggggaaaccctgaaaatattttgcaaaagttgccgctaagaggctttgccttcgcgcaacaccagtaaatacggggtgtagtgctcagcgcgcaggttgagggtgtattccagcgctttgatcacggcctcgggtttgtcgatctcgaacacgccggacaccacgcgattacgcagcgaatcgcccagcaccagggtcgtgccaggccagtagcggttcaactcgctgaccacttccgacagcggctgttggcgaaacaccagttgtcgctggcgccaggcaaaaccgctggccgcatcgaaaccgtgcacctcggcaaggcgctcgccctgatattccacggcccgtcccggctccaggtagaccggctcaccggcgcccgcgctgacctgcaccttgccctgcgccacttgcacgcgcgtctgcgcatcccgccttgccacgctgaactgggtgccgaccaccttcacccagccctcgccggactgcaccacgaagggccgcgccgggtctttggtcacgctgaaaaaaccttccccgcgcaacaggcggatctgacgctcaccgccgctcatgcgtacctgaacagcactgtcagtgttgagctgcaactgggagccatcggccaactcgaccgtgcgcgactcgccggtgccggtggcatagtccgcgcgcaggcggtcgagccagggcgtgtgctgcacggtcaacccaaccgtcagcagcaccgcagcggcataagcccagcgccgcgcgggtttgcgccacgcggcctgctcggcgcggcggatcagccgtgccggttcacgcaaaccaccgagcatcgcctgcacttcctgccaggcgtcgtcctggggctggccctgcccgagccaggcggcaaaggcgtccatctcggccggggtcacgtcctcggcctgcaagcggaaataccaggcggacgcttcttcgaacaacacgtcgacagggggtaacgcagtcatgaccgacgtccttgtgtgtcgcaggcgagccgcgtcttgatgtaggcgcggcattcaatcaaggcgcgacgcagttggtattccacgctgcgtggggtgatcgacaggcgttcgccaatctcgcggtaggaaagttcgtcgacatgatagagcaggaagatctgccgagtcgcttcgggtaacgccaggatggcgtcctgcatcagtcgctcctgctggtaggcggccagttgttcgtcggcaccggggttgccgcacggcagctcttcgctgggctcgccggcatccaggcgctcacggcggatggcctggcgctggtgatcgcgcaccaggttgctggcgatggtgaagaggaaggctggcaggttgtcgatcttctcgccggaatccaggcgtgccaggcgcaggaacgattcctgggtcaggtcggcggccacctgagcgctgccggtgcggcgggtgacgaaggcttcgagggctttcttctgctccgcgaacaggcgcgcgatctgcgaattccaggaggacacagcactaccttgagaagaaccgagggttcaggaagtgcgcacgctagcagaggatgagattggttcgcaattgatatctatttttgctgtgacctttagggtgtcaatcagatagctatcgggggcaagccccctcccacagttgaccgagttcacactgtcgaaatgtgggagggggcttgcccccgatcaaagccacctcggacttattggatttcgtcaggcttgacgatcacccagttcttgtccgccgttaccggcaacccttccttggcctgcgccgccgcgtgcttggcgatcatgccgttgagttgggtcatgtacttgtccttgcggttgatccacaaatgcacgccgcccttggccacgtctacatcgtgaaacagcatgtagccatcgctggtcggggtgtcgccacccaccagtaccggctttttccattcgtcgatgtaagtgaggatcgccgcgtgcttgccggccatccaggtcgccggggtccacaggtagggcgtgagttccaggccgaggttggccttctcgtcatacttgccggcggtgatctgtttgcgcgcggtggtcagctcgccggtcttgcggtccttgagcagggtggtcacaccgatgacgttctcgggcttgacgttgtagccgtacttcggatcggcggcgaccatgcgcaccagctcttcggaagcagcggtcatcacgtagacctcgatgccgttttccatcagcttgttgtacagctcggcctggccggtgaagactttcggcggttgcacctcggacttcttaaccgcgtcaccttcgaaataggtaacgggcacgggcttgccagaggccatcagctcatcgacctgcaccttgagttccttgagggtgaaccccgagaacacctgggcaacccacgggtagcagaccatgtcgtccacttcgcagaggcggtagtagtagctgaacagactttccttatggtcggcggtgtctttgaacggcataagcttgagcgacggatcgaggctgtcgcgggtgatcaggcccttgttttccatgtagggcagcagggactcttcgaggtcatagcggtagctggtgttgtccatgtcgaacaccgcgaaattgcccttgttggcgttggcagcgatcattttgttcagttgctcggcggccggggccggccagtgtttcaactcggtggcggccatggttggtccggcaaggccaatgcacaacgcggcggcaaacaatctcgaagcgagcttcatatgcgtttctccctgagtgaaaaacatcgacgctaacaaatccctgtgacagttatcgcccgagcacgaccgcttgcgtcgtgatcgcgccaatggcatgtgcctgagcgtcaaaggcttattccaaaaacgacagtcaccattccatatcggtattaaatcaatatatttcaagctgttaggctttccggttcgcaatcgcaggctcgcgcgattggctgccttctcaacggagcttcaatgaatctgcccctgattctcaacttactggtgttcgtggccctgttgctgggcctggcacaaacccgtcgcacaaactggagcctggccaagaaggtgctgtttgccctcgtccttggcgtggtgttcggcaccgtgctgcacacgatctacggtgacggcaacccggtactcaaggcctccatcggctggttcgacctggtgggtaacggttacgtgcaattgctgcaaatgatcgtgatcccgctggtattcgcgtcgatcctcagcgccgtggcccgtctgcacaacgcctcgtccctgggcaagatcagcttcctgaccatcggcacactgctgttcaccactgcgattgcggcgctgatcggtatcggcctgaccaacctgttcggcctcaccgccgaaggcctggtggccggcacccaggaaatggcgcgcctgcaagtgatccagagcgattacgcgggcaaggtcgccgacctgaatatcccccaactgctgctgtcgttcgtgccggccaacccgttcgccgacctggcccgggccaagccgacctcgatcatcagcgtggtgattttcgctgcgttcctgggggtcgcggcgctgcaactgctcaaggatgacgtggaaaaaggccagaaagtcctcaacgccatcgacaccctgcaagcctgggtaatgcgtctggtgcgcctggtaatgaagctgacgccgtatggcgtattggcgctgatgaccaaagtggtcgccggttccaacctgcaagacatcatcaagctcggcagtttcgtggtggtgtcgtacctggccctgggcctgatgttcgtggtgcacggcctattgctgtccctggccgggatcaacccgctgcgcttcttccgcaaggtgtggccggtgctgacctttgccttcaccagccgctccagtgcggcggcgatcccgctgagcattgaagcgcagacccgccgcctgggcatcccgcaatccatcgccgggtttgctgcctcgtttggcgcgaccatcggccagaacggttgcgccggtctttatcctgcgatgttggcggtgatggtcgcgcctaccgtgggcatcaacccgctggacccgctgtggatcgcgaccctggtggcaattgtgaccttgagttcggcaggcgttgctggcgtgggcggtggcgcaaccttcgccgcgctgatcgtactgccggccatgggtttgccggtgtcactggtggcgctgctgatttccgtagagccactgatcgacatgggccgtacggcgctgaacgtgaacggttcgatgacggcgggggcgattaccagccaggtcatggggcagacggataaggcgttgttgaatgccgatgagcatgcggaattagcgcaagcctgatagatagcaatcgggggcaagccccctcccgcacttgactgggctcacacggtcaacatgtgggagggggcttgcccccgacgcttttaggctttttcccagacttcgaagttgtacgccggcttatcaccttcagctggattctccagattggaaaccaacttccactggccccgatcaaactctggaaaccaggcatccccctccgggctcaacgccacccgcgtcaaatacaggcgatccgcctgctccagcccctgcgcatacaactgcgcaccgccaatcagcatcagctcgtcaacaccttgcgccgttgcccattcctcagcgcgctccaccgcggcctccagagacggaaaaacttccgcaccttccagcgccagatcggtctgacggctaaccaccaggttcaagcgccccggcagcggtcggcccagggaatcccaggtcttgcgccccatgatgatcggcttgccgagcgtggtggccttgaagtatttgaaatcccccggcaaatgccagggcatgctgttgtcgacgccgatcacacggttttcaccgagggctgcgatcaggcttaaagggagagtttttttcatggcgacgagaataccagagccccgagccaggggttatgctccaggctcacaaacacgacaggacaacgcgtgactcctctgcacactctctggctgacagaaaccgtgcgcctgcgtgaagaacacgccggccccctggaagacctggaagccaatcgcctggcccgctcggcaggtggcgatctgccgacgcgtatccagcagcgtgccctgcacctggccgagcgcgatgggctcacgaccgccctcacccgctggttgcaaggcgcacgcctggcgctggtgctgctggcggtcatcgccgtgatcagcggcgcgggcctggcctttgccgcgctgggcaacgggctggtcccggtgaatgtgttctgggccttgggcagcttgctcggcttgaacctgatcctgctgatcagctgggccttgggcctgctgtttgccggtgaacacagcgccagcctcgggcgactgtggttatggctcagcgaaaaactcgcccgtgacgcaaaggctgcgcagttggcgcccgcactcctgctattgctgcaacgccagaaactcaatcgctgggccgtgggtatgctggtcaacagcctgtggttgttggcgttgctcagcgccctggtgattcttcttacgctactcgccacccgccgctacggcttcgtgtgggaaaccaccatcctcggcgccgacaccttcgtcgccgtgacccaggccctcggcaccctgcccgtgctgatgggcttcaatgtgccgagcgtcgagatgatccgtgccagcggcgattccgcgctgaatatcgaaagcgcccgccaagcctgggccgcatggctggtgggcgtgctgctggtctatggcctgttgccacgcttgatcctcgccctgctgtgcctgtggcgctggaagcgtgggcgcgccgcgctgcgcctggacctcaacctgcccggctacagccaattgcgcgagcgcctgatgccgagcagcgagcgccttggggtcaatgatgccgcgcccgaacaactgcatcacatcagcggcggcgtcagcgaactgcaaagcgacggcgcgctgctggtcgccatcgaactggacgaccagcattcctggccgcccaaactgccgcacaacgtgaagaacgccggcgtcctcgacagccgcgaatcgcgtaacaaactgctggagcaactcacgcgctttccgcccgcccgcctggccatcgcctgcgacccgcgccgctcgccggatcgcggcagcctggcgctgatcgccgaactcgcccgcagcgccaccgccacccgcgtatggctgctgcaagcgccgcccggccaggccctggacgccgaacgcctgggcgactggcatgccgcgctgcagcagcttgaattgccctttgccaactgcgcgccgctgaactggctggagaccggtcatgactaagcccctgaaactcgccgtggttggccacaccaatgtcggcaagacctcgctgctgcgcaccctcacgcgagacgtcggtttcggcgaagtgtcccatcgtcccagcaccacacggcatgtggaaggcgcgcgcttgtcggtcgacggcgaagccttgctggagctgtacgacacccccggcctggaagacgccatcgccctgctcgactacctggaacgcctcgaccgccccggcgaacgcctcgacggcccggcccgcctggcgcgcttcctggaaggcagcgaagcgcgccagcgtttcgaacaggaagccaaggtgctgcgccaactgctggcctccgacgccggcctgtatgtgatcgacgcccgcgagccggtactggccaagtaccgcgatgagctgcaagtgctggccagctgcggcaaaccgttgctgccggtgctcaactttgtcagcagcagcgaccaccgcgagccggactggcgcgaagccctggcccggcttggcctgcacgcgctggtgcgcttcgacagcgtggcaccaccggaaaacggcgaacggcgcctgtatgaaagcctggccctgctgttggaaaacgcacgaccgcaattggaacggctgatcctggatcaagaggcgcagagccaggcccgtcagcaaagcgccgcccggctgatcgccgaattgctgatcgactgcgccgcctgccgccgcagtgtggtcaccgaagatgagcaacacgccatcggcgacctgcgcaaagccgtgcgccaacgtgaacaaaagtgtgtggaggcgctgctcaagctgttcggcttccgcccgcaggatgccgccgccagtgacttgccgctgctggacgggcgctggggcgacgacctgttcaacccggaaaccctcaagcaactcggcgtgcgcgtcggtggcgggatcgccgcaggcgcggcggcgggtgccggtgtggatctgttggtcggcggcctgaccttgggcgccgccgccctggccggcgccattgccggtggcgcgctgcaaaccgcgcgcagctatggcagccggctgctgggcaagatcaaaggccaacgcgagctgaccgtggacgacagcgtgttgcgcctgctcgccctgcgccaacgccagttgctcaaggccctgggcctgcgcggccatgcggcgatgcacagcatcaaggtcgacacgcctcaggacaagacctggcgcgaaggcaagttgccggacgcgttgcacaaagcccgcgcccatccgcaatggtcgtcgctcaaccctcaccccaagctcagccaggctgagcgccaggaacaggtcgaagctctggcccggcgcctcgacgaaacctaagccgccagcacctgccgcgccttggccttgagcacctcgaggtcgagcaccggcacgtgcattgccttggcctgctcgtcccaatggcgcatgcgcaggctgatctcgcagagcgggtcttgatcaaacgcccgcgcttcttcctgggtcattacaccgccctggtacccgagcgtacggcgactggcttcgctcaggcgggcgtaatagtccggctggctgaaggtcaggtagcgcttggcttgcacgtgatattccaccagcttggccatgcgctcgctgaagcctgcacgacgcaggtaatcggcgccgagccgctcatggctgaccacgccataaccgcccatgttctcgccgccttcgccgcacaagtgcccgatatcgtggaaaaacgccgccagcaccacttcatcatcgaagccttcggccatggccaactgcgcggcctgggacatgtgctcgatctgcgacaccggctcgccaatgtaatccgctgtgccgtgttgctcgtacaagccgaagacttcgtcgatggtctgttcagaggtcatcacgccgccccccacaaggttgtgatattgcgttcggccatcgccggccccacgctcatgcccacaccggtgtgcatcaacgctgcactcacacccggcgccgctcgcaggaacgaaaacggcgccggcccgcgcgagccgtacacaccctgccagcgctccaccacctggatcttgcagcccagggtctgctcggccaactcgatcatccagtcatccacctgctcggcattgaacggcgatgcatcgctgccgtagtcatgggagtcaccgatgatcagttcgccatggggcgtggggctgatcagcaaatggatgccgtgttcgtgcaggtgtggcgcttcacgcaggatctgcgcctggatcggcgccgcttccgggagatcggcgaaagcgccgtagtgcacgcagctcaagccggtgagcaaggcgtgttgcaggttcaggttcaccgctggccgcgcgcgcagcatttgcaggcgacagatgctcgggttgagttcggccatcgcttcggccagcagagtctggtagtcgtggccggagcacacgatgatctgttcagcgcgaaagctgcctgccgtgctgtgcaactggcccggttcgacgtcgcgcaccagggtggagaagtagaactccacgttcagctcttgcgccaggtagttgatcagcgccgggatcgcttcacgcgaatacaactgctggtcatccttgccgtgcaacgcggcgcggtgatggcggaactggccgccgtacaggtccttcatcgcggagccttgcagcaactcgacgtggtagccgtgctcctgcgcacggccagcgcagaacgcttccagtagatgctcttcggcttcggtacgggcgaacaggtatgagccgttgcgcttgagttgcagcccggccacctgcgcccaatggccccagatttcgcggctttctcgcgccaggtcgagcatcggcccaggtggttgaccggtcaccagggcctggccgaagttgcgcaccgaggcgcccagcggcgtggcgctgcgttcgaagaccttgaccttgaggccgcgcctggcggcggcaaaggcgtgggacaggccgaggatgccggcgccgatgatcagcaggtcgctgtggtgtgtcatatcgtgatgtcctgttttgcagaccgccatcgggggcaagccccctcccacagttcgatttgcgaatgccatcagtgtgggagggggcttgcccccgataaggccagtagccccaacgaaaaaccttactgcgctgccactttctccgacttgccgtcatagcgcttgcgccattcggtcaggatgctgtcgcggttcttcgacgcccaggcaaagtcgttcttgatcaagcgctgctcgtagtcggccggcaattcggtctgcggcttggcgatgcccggctgggcgagcacggcaaagttgtccttgtacaggtccatggccgccgggctggcggagaagtcggcgagcttctgcgcggcgtccttgtgcgcggtgcctttgatcacggcggtggcttcgatgtcccagcccaggccttccttcggcaggatgatgtccaacggcgcgccctggcgtttcagctggacggccgggtattcaaacgaaatgccgatcgggaactcaccggaagccgcaagcttgcacggcttggaaccggagtgaacgtactggccgatgttctggtgcaggtcgtccatgtactgccagccctgcttctcgccgaaggtctgcaaccaggcgctgacgtcgaggaaaccggtgccggacgaggccggattgggcatgacgatcttgcccttgtactcaggctttgtcaggtcctgccagctcaccggcttggtcagcccctgtttctcggcttcgacggtgttgaagcagatggtcgcggcccatacgtccatgccgacccaggccggagggttggcggcgtcgcggtagtgcttgccgatcttgtccaggtccttcggcgcgtagttgtccagcataccttgctggtcgaggatcgccaggctggacgcggccaggccccagactgcgtcagcttgcgggcggtctttctcggccagcagcttggcggtgatgatgccggtggaatcgcgcacccacttgatctcgacgtcggggttagcctgttcgaaggcctttttgtaggtcttcaattgctcggcttcgagggccgtgtacacggtcaactcggttttcgcggcaaaggcattcacgctgaatgccgtgagtaccgccgcgaccagcgccaggggcttgaacatggaacacctccttcaggattattggccgggcgcggtctggcgccaggcttgggagcggcgcagtgcgccacgtgaggcccacgccagcagcagcgagacgccggccgacgtgaacaggatcagggtcgacatcgccgccgcaccgcccacgttgccggcgtcgtccatgttcaacacggcgacggcggcgaggatggtgtcggggctgtagaggaagatcgcggcggacacggtggtcatcgccgacacgaacaggtagcgcacgatatccagcagcgccggcaggcagatcggtaccgtcactttcaggtaatgccggtacagcggtgccttgagggacagcgcggcggcttcgaactcggcgtccagctgacgcagcgccgtggtggcggtcatctgggcggtggtcaaatagtgcgcaatggtgcacaccaccagcagggtcatggtcccgtagaacacatgcagcgggttgccgttaaggttgaaaaagaacacgtagcccaggcctagtaccaggcccggcacggccatcggcacgaagctgagcatgcgcagggccaggtttaggcccttctggcccttggttttttccatcaggtaggcgccggtgaagatcagcgcgctgccgatcaatgcggtgcacagggccagggtcaggctgttgcgataggccagccagccgccgccggccgtgtcttcgaactggtaatggttgagggacagcgacaggttgtacggccagaatttcaccagcgaggagtacaccgccatgccgaacaccagcagcaacaccgcgcagatcagcagcacgatggccaggtagcaggcatctctcaggcgcgagggcaccggttgaaacacttgtgcacggccgctcatcgaatcgccgtgacgacggcgcagccaggcatccaccccaaagctgagcagcgccggcagcagcaacaccatgccgatcagcgcaccgcgcccgaactgctgctggccgaccacggccttgtaggcttccagggccagcacctgataatcgccccccaccaccacgggcacgccgaagtcggtgatggtcagggtgaacaccaggcaaaacgcggcgaacaccgcctggcgcgtggccggccaggtgatgctgcgaaacgcccgggccgggctggcgcccatgctggaggcggcatcgaacaggcgtgcatccgccagggacaacgccgacagcagaatcatcaaggcatgtgggaaggtgtagatcacctcccccagcacaatgccccagaaaccgtagatattctccgagagcaacccacgcagcatgccctggttgccaaacaggtagaccagcgcaatgcccggcagcatcgacggcgccatcagcggcagcagcgacataccgcgccagatcgccttgccgggaatcaaggtgcgttgcagggcgtaggcaaacaggtaagccagcggtacgacgatggctgccacgctcagggacactttcaggctattgcccagcagccagtggaagttggcgctggtcaccagctcccgcgccgccaacaggccaccgccctgcccggcctcgctgctgaaaccgcgccagaagatcgccagcaacggcatcaatacagcgatacccaacagcaacagccacagcagtttgccgccgacgacgaaaattctgtcgccggtttcggcgcgggaaacctggcgtggcagcgtcatgacagcggccatctcaggcaaacacctgcaggctgcgcggcggcaaggccacccagatgtcctgggcgcccaggcgcggcatggcttccggggccagttcggcgagcagcgggtggccgggcaattgctccagttcaaagctcatgcggcagcggttgccaaggaaggtgatctcgcgcaccttggccgggaacaggttttcttcatgcaccggcgggttgacgctgatcgcctccggacggcagaacaggcggcccgacttggccacgccagcatcgtcggccaggcgcatgttcatcccgccgacctgggcgtgactggcactgttgcggctgaacggcagccaattgccctggccgacaaactccgccacgaacggcgtggccgggcggtcgtagatctcctggggcgtggcgtattgctcgacctcgccgttgttcatcacggcgatgcggtcggccatcagcatggcttcgtcctgattgtgggtgaccatcagcgtggtgatgcccaggcgccgttgcagttggcgcagctcggtgcacagatgctcacgcacgcgggcgtcgagggccgacatcggttcgtccagcaataacaatgaaggcgcgggcgccaaggctcgggccaaagcgacgcgctgctgctggccgccagacagctggccggggtatttcttttcgctgccgaccaggccgaccagttcgagcatctggccaacacgctggcgcacttcatcacgaccactgccggtgaggccgtagccgatgttcgcttcgacggtgaggttgggaaacaacgcgtaggactggaacaggatgccgtagtcccgcgcctggggcggcagccgggacacatcgcggttgcccaggtaaagctcgccactgtcctggcgttcaaggccggcgatgcagcgcagcaaggtggtcttgccgcaaccggacgggcccagcaggcacaccagctcgccggcggcgacgtccagcgagacgttatccagcgcggtaaacgcgccgaagcgtttctggataccgcgcaccttcatgggcgcgccgggttgggtcagggctgtgttcatgcaaggcacctcatcgaacggatgaaggccatgctaggggggcaatgcgtccctggtgtggcagaaaggcaaaacccggtgatagtggtattggtggatttgggtagggctctcagcgctgagttgcctggtctatcgctatcgggggcaagccccctcccacattcagagcgtgtgaacccgaaaaagtgtgggagggggcttgcccccgatgaggcccgaaaagccaaccaaaaacttaaattggcgacatttcctgcgccagcccaagaaaggccgccggcaaccgcgcgccctttctttccttgaggcagtacagatactcaggaatctgcggtgcattctcgatggtcagcacgcgcaattgcggatcgtgtggcacttcttgccgcgcaatgatgctgatgccaatgttgcgcagcaccgcttcacgaatcgactcgcggctgccgatttccagcagcggtccgaagctcacacctgcgctctgcaacagttcttcggtcaaacgtcgcgtggtagagcccgcctcacgcatcaacagcgtgtgcccggccaatgcgttgagcggcacatggtcgagcttggccaacggatggttgcgatgcaccgccagcaccagcgggtcggtgcccagcacacggcgaatcaggcgtgggtcttccagcagttgcgaggaggcggcgacgtcgacacggtaatcgtccaaggcttctagcacttgttgggagttaccgatttccaccgacacttccacttgcggcaggcgttcacgaaaggctttgaccaggtcgaggatgtagtacggtgccgtggcggcaatcctcagtgcaccctggacctggccattgttgcgtagaaaaaattcgatgtcggcttcttgctgcaacagcgccttgaccatcggcagcagccgcgcgccctcgtcgctgacggtgaggcgacggccgccacggtagaacagctcaacaccgtattggctttccaggttacggatctgggtggtgaccgtgggttggctcaggccgagttttttcgccgcctgggtaatgctgcccaggcgggcgaccatgaaaaaagccttcaactcggcactcagcacaccaccctctcatcgtttatttgcgcaacaggcgcaggccattgaacaccaccagcaggctcacgcccatgtcggcgaacaccgccatccacatggtggccatgcccaggaaggtgaccgccaggaagatcgccttgatcaccaatgccagggcaatgttctgcttgaggatactcgacgtttgccgcgacagacgaatgaaagccggaatcttgcgcaggtcatcgtccatcaaggccacatcagcggtctcgatggccgtgtcagtacccgctgcggccatggcaaaacctatctcggcgcgagccagggccggagcgtcgttgatgccgtcgccaaccatgccaacgcggtgaccttggccgtagagggtttcgatggcttgcagcttgtcggtcggcaacagatcaccctgggcctggtcgatgccgacctgggcggcaatcgcctgggcggtgtgggtgttgtcaccggtgagcatcagagtcttgatgcccagttcgtgcaactgctggatggcttctcggctgctgtccttgaccgtgtcggccacggcgaacagcgccagcgggccggatttgtcgagcagcaacaccacggatttgccttgtttttccagggcgaagagtttctcttccagctccggcgagcacaggcccaggtcttccaccagtcggtggttgcccaggtggtaggtttcgccgttgatctcgccacgcacgccgcgaccggccagggccacgaagttatccacaacgtgggtgggcaggtttttatccacagccgcgttggcgatggccagcgacaccgggtgatcggaacgccccgccaggctggcggccagcgccggtgcgctgtcttcgacgttggggaacagcgccaggtagtcggtttgcaccggtttgccgtgggtgatggtgccggtcttgtcgagggccaggtagtcgagcttgtaaccgccctccaggtacacgccgcccttgatcaggatgcctttgcgcgccgctgccgcgaggccgctgacgatggtcaccggggtggaaatcaccaatgcacacgggcaggcgaccaccagcagcaccagggcacggtagatccagtcgaaccaggcgccggccatgaacagcggtgggatcaacgccacgcccagcgcaaacaggaacaccgccggggtgtagatcttcgagaagctgtcgacgaagcgctgggtcggtgcccgggcgccctgggcctgctccaccgcgtgaatgatgcgcgccagggtggagttgttggcggcggcagtgactttatattccagggagccggcctggttgatggtgccggcgaagactttgtcgcccacggtcttttcaatcggcaggctttcaccagtgatcggcgcctggtcgatggtggattggccagcggtgacttcgccgtccaggccgatgcgctcgccaggctttacccgcacgatggcgccaagatcgatactcttgacctcttgttcagcccaagacccatcagcctgttgcacggtggcctgctcgggcgtcatttgcatcaagccgctgatggcattgcgcgcacggtccagggacttggcttcgatcaactcggccacggtgaacaggaacatcaccatcgccgcttccggccactggccaatcaggatcgcaccggtcaccgcaatgctcatcagggcattgatgttcaggttgaggtttttcagggcaatccagccctttttataggtggtgaggccgccgctgaggatcgacaccagcgccacgatggcaatcacccaggtcggcgcggcgttagtgaagtgcagcacttccgccgccaacgcgccgatgccggacaacgccagcggccaccaatgtttcttggcgggcggttcggcggcgggggtgccttcttcgatgggatcggcctgcatgcccaaggacttgatggcgtcgatgatcggcgcggtactcggcaggtcgtgggtgacgccgaggatgcggttgatcaggttgaattccagctgctgcacacccgcaagcttgcccagtttgttctggatcagcgtctgctcggtggggcagtccatggcttcgatgcggaaggtgctcagccgcgaaccggcggtgggcgcttcgctcaattgcaccaatgccggggccggcgtgccggagcagcaggagccgccgtggccgtggtcatgcacaggggtcaatttcttcgggccatgatcatggtcgtgatcgtgcttgtgcggggtgtggatggaatcgctcattctgtcgcgtccgtaaaggtgcctgttgccaagtaaagaccctgtagccactatagggtcaagcacccatttggagattgttgcgatgaagatcggcgaactggccaaactgaccgactgcccggtggaaaccatccgttactacgagaaggaaggcctgctgccgcccccggcgcgcaccgacgccaactaccgcgtatacacccaggcacacaccgagcggctggtgtttatccgcaattgccgcagcctggacatgaccctggaagaaatccgcagcctgctggggctacgggacagcccccaggaccagtgcgaaagtgtgaatgcgttgatcgacgagcatatccaccatgtgaaggcgcggatcgatgggctgttggtgttgcaggagcaattgctggacttgcgccaacgctgtggcggcggggatcagtgcgggattctgcagcggctggaagtcagcggcagtgtgttggccagtgaggctgagccttcccatgtgggcagaagccacggccattaactcaaacgaagacggttcaaatgtgggagggggcttgcccccgatggggagttccagccacccaatacttagctgatccaccgctatcgggggcaagccccctcccacacaagccacaccttaagaccaggacagccttcagatcgcgacgtcggccttgatgcttgggtcggcgtcgtagcccacgatctcgaagtcttcgaacttatagtcgtagatcgacgcaggtttgcgcttgatcaccagctccggcagcttcttcggcgtgcgcgccaactgggtgcggatctgttccatatggttgctgtaggcgtgggtgtcgccggtggtgacgatgatctcgtgggggatcaggtcgcactgctgggccagcatatgggtgagcaaggccagcgcggcggtgttgtacggcaggccgaggaatacatcggagctgcggatgtacaactgcatcgacaggtgaccgtcgtgcacgaacgcctggtacagcaggtggcacggtggcagggcttgtttgccgttgcgcgcgttttcctgcgggctctgggtttcgtcgggcaggtactcgacgttccagccgtggaacaggatgcggcggctgttggggttggtcttgagggtgtggaccatgtagtcgatctggttgatcgtgccgccgtccttggttggccaggccgtccactgctcgccgtacaccgggccgaggtcaccctcttcggtggcccattcgtcccagatgcgcacgccgttttcgttgagccacttgatgttggtgttgccgctcaacatccagatcagttcattggcgatacttttgaagtgaagcttcttggtggtcagcagcgggaagccgtcggccaagttatgccgatactgacgggcaaacacggccttggtgccggtgccggtgcgatcgcccttggtcaatccattggtcacgacgtcgttcagtagctcgagatattgcttcatgtgggtacccgtatcgttgaagcccaggccagataaagacctgggcattcgaatttaaagcgcggtgttcttcaaaggttgcgggcgattgtacgcccaccacagcaggcccaggccgccgatgatcatcggcaggctgaggatctggcccatggtcacccaaccgaacgccagatagcccagttgcgcatccggcacgcgcacgaactcgacgataaagcggaagatcccgtagaacagcgcgaacatgccggaaaccgccatggtcgggcgcggtttgcgcgagaaaatgtagagaataaggaacagtgccacgccttccaacgcgaactggtaaagctgcgacgggtggcgcggcaattgcgccgggtcgctgaacggcgggaacaccatggcccacggtacgtcggtcggcttgccccacaactcggcgttgatgaagttgccgatacgcccggcgcccaggccgatcggcaccatcggcgcaacgaagtccatcagttggaagaacgacttgccgttacggcgaccgaaccaccaggcggcgatcatcacaccgatgaacccaccgtggaacgccatgccgcccttccacacttcgaagatcagtgtcgggttggcgatatacgccgaaaggtcgtagaacaacacatagccgagtcgtccgccgacgatcacccccatcgacagccagaaaatcaggtcggagagtttctccttggtccaggtcgggtcgaaccggttcaggcgtcgggaggccagaaaccaggcaccgccgatgccgatcaggtacatcaacccgtaccagtggattttcagcggaccgatggccagggccaccgggtcgatctgcgggtaaggcagcattgcgactcctcgttaaatcattcgttaggcgtgcggaccatgccggtgtgcgattaagcctgcgttacagccgctgtttcaaattaagaagttcacacgcaccgaaacgccaggcatgttaacggatggaaggcgtgccgcccaacttcgatacgatggaacgcctgccgctgtatgagtagagtgacaaaaaacacaaaagggatcgcctgatgtgcctgattgtttttgcctggcggccgggccacgcccagccgctgatcgtcgcggccaaccgtgacgagttctacgcccgccccagcctgccgctggcccagtggccggatgcgccagaggtgtacgccggtcgtgaccaggaagccggtggcacctggctgggcgtgaatgccgatgggcgctttgccgccctgaccaatatccgcgacccgcatcagccgccggcccgtaagtcacggggagagctggttgcgcgatttctcaacggttcgctgccgattgatgagtatttagccgacgttaacggccgttcaattgaatatgccgggtttaacctgctggtgggcacgcgggatgagctgtggcattacaacgccaatcacaccgagcccacgcgcttgaaggccggagtgtatggattatccaatgcggggctggatacgccgtggcccaagttgctcaaggccaaggcggcgttgggcgaagtattggcggacccgcagccggaggccttgctggaaatcctgagtgatccgcagacggcaccgtttgccgatttgccggataccggcgtggggttggcgacggagagcctgctgtcgagcgtgtttattgccagcccgagttacggcacgcgggcgagcacagcgctgatagtgaatgccgacggaacgcggcggatggtggagcgcagttttgggccgcatggtgggcggctgggcgaagtcgaaatcaacctataaccacaccgaaacccaatgtgggaggggcaagccccctcccacatttttaaagggttttggcagacgccgggttgatcatccgcgtcagccccaggttcttcagggccaactgcaacgagctgtggataacttgcgggttgtcgatagtcatcaactccgccagcagctccttggccatgctcagttccacctggcgcagcatccatttcaccttcggcaagttggtggcgttcatcgacaggctgtcaaagcccatcgccatcaacaacactgccgccgccgggtcaccagccatttcgccacagatgctcaccggcttgccttcggcatgggcgtcgcgcaccacatgttgcagggcttgcagcaccgccgggtgcaggtagtcgtagaggtcggccacccgtgggttgttacggtccacggccaataggtattgggtcaggtcgttggaacccactgacaggaagtccacctgccgtgccagttccttggcctggtacaccgccgccgggatttcgatcatcacaccaatcggcggcatcggtacgtcggcgccttcgtcgcgtacttcgccccaggcgcggtggataagatgcaacgcctcttccagctcatgggtgcctgaaatcattggcagcaggatgcgcaggttgttcagaccttcgctggccttgagcatggcgcgggtctgtaccaggaagatttccgggtggtcgagagtgacgcgaatgccgcgccagccgaggaacgggttgtcttctttgatcgggaaatacgacagtgacttgtcgccgccgatgtccaggctgcgcatagtcaccggcaacgggtggaaggcctgcagttgctcgcgatagatcgccagctgctccttttcactcgggaaacgctggttgatcatgaacggcacttcggtgcggtacagccccaccccttcggcgccgcgctgttgcgcacgggccacgtcggcgagcaggccggtattcaccagcaacggcacacggtgaccatcggtggtcacgcatggcaactcgcgcaatgaatcgaggcccagcgccagttgcttctcttcctcaaccacttcggcgtattgcttgcgcagcacttcgctggggttggtgaacacttcaccgcgatggccatcgacgatcatgtcgataccatccaccttggaatacggcaggtccaccaggcccatcaccgtcgggatgcccatggcccgggccaggatcgcgacgtgggagttacccgaacccagcaccgagaccaggccaaccagtttgccttctggcacttcgccaagcatggtggcggtcagctcttcgctgatcaggatggtgttgtcggggtagaccaggttggtggtgcgatcttcctgcaggtacgccagcagacggcgaccgaggtcgcgcacatccgaggcccgttcgcgcaggtaggcgtcgtccatcagttcgaaacggttgacgtgatcggtgaccacctggcgcagcgcgccctgggcccattggccggtcttgatcacggtcttgacttcattacccagcgacgcgtcgtcaagcatcatctggtacacgtcgaacagcgcgcgctcttcggggcgcagttgggtggccagcttggtcgacaggttgcgcatgtcggcgcgcacgccttccagggcggtcttgaacaatttgatttcagcgtcgatgtcggtgacggtcttgtccggcaccacgtccagatccgccggcggcagcatgaccaccgccgtaccgaccgcagcgcctggcgaaccgggtacaccaacgaacttggcttcctggatacccttgccttcgcgccccaggccgcgaatcgagccggtggcttcggcgtgggcgataaccccggcgagttgcgcgctcatggtcacgaggaaggcttcttcaccttcgtcgaattggcgacgttctttctgctggatgaccaacacgccgacgacgcggcggtggtgaatgatcggcgcaccgaggaacgaggcgtaacgctcttcaccggtttcggcaaagtagcgataacgcgggtgatcggccgcgttttcaaggttcaggggttcttcacgcgtccccaccaggcccaccagaccttcattgggcgccatgctgaccttgccgatggagcgcttgttcaagccctccgtggccatcagcacaaaacggttggtctcggggtccagcaggtaaaccgagcagacctggctgcccatggcttccttgacgcgcaacacaataatccccaacgccgccttgagatccttggcggagttaacttcctggacgatcttgcgcagcgtattgagcatggctcggggtcgaactccgtcgtcagtcgcgcgctaaaaggcgcggggcaagctctttgagcgcgcgacgataaacctcgcgcttgaatgtcaccacctggcccaacggataccaatagctgacccagcgccagccatcgaactccggtttaccggtcaaatccatccgcacccgctgctcgttggagatcaggcgcaggagaaaccatttctgcttctggccgatgcacagcggttggctgtgggtacgcaccaggcgttgcggcaaacgatagcgcaaccagccacgggtacaggccagaatttgcacatcttcgcgctcaaggccgacttcttcgttcaactcgcggtacaaggcgtcttcaggggtctcgtcggggttgattccaccttgaggaaactgccaggcatcttggttgattcggcgagcccatagcacctgtccggcatcattcgtaagaataatcccgacattaggacggaaaccatcggggtcgatcacggcaacaacctcgcaaacgcatgtcgccgcattgttccacaaaggttgatgaagcggcaacgaggcttcgtaccttatgtgcactcttgtgaaaagaccgtattctggacgcctttttacagacttttcagcgagtaactgcaatgcgcctggctttattcgacttggacaacacccttctcggcggtgacagcgatcacgcctggggcgattacctctgtgaacgcgggattctcgacccggtggcctacaaggcccgcaacgacgagttttaccaggactacctggccggcaagctggacaatgccgcctacctgaacttctgcctggagatcctcggccgcaccgagatggcccagctggacgagtggcacaacgactatatgcgcgactgcatcgagccgatcatgctgccgctggccattgagctgctggccaagcaccgcgccgccggtgataagttggtgatcatcaccgccaccaaccgtttcgtcaccgcgccaattgccgcacgcctgggcgtggaaaccctgatcgccaccgagtgcgaaatggaaaacggccgctacaccgggcgcagcaccgatgtgccgtgcttccgtgaaggcaaggtgacgcgcttgaaccgctggctggaagaaaccgggtacagccttgaagacagctacttctatagcgactcgatgaacgacttgccgctgctggagaaagtgactcacccggtggcggtggatccggatccgaacctgcgggccgaggccgagaagcgcggctggccggtgatcacgctgcgcagctgatgaagccatcgggggcaagccccctcccacacttgatcgggttcacacggtcaaaatgtgggagggggcttgcccccgatgcagacgactcggtccaaagccttaaaccggcttggcgcccatcagaccggcaatcgccacaaaccccaccagactgaccaccgccagcaccagcgtgaagttcaggctaccgccctcgcctttgcccaggcgattgagccgcgccaccagccagaaccaggccagcgccgccacggtatagaggatgctggagcccaggatccaggtctggcccagcggccagcccaccaggtgcaccagccaccagccggtaaacggcatgctgaccacgcatacgcccatcagcaaccaaacaaaggcccacgggcgttgcacggtcgccgccgggccggcgctgcgtttgcgccaggccagcagcgccaggccaaggccactgagcagcaacaccacggtggctgccatgtggataactttcagggtggtcagggtttccatgtgtcgttttccttaaaggccgccccctcagcgtagtcgctcaaccgaggaacagtttgtaggccgggttatggctttcatcccagtacgggtagccgatggcttccagggcggccggtaccaggtgacgttcatccgccggcacttgcagcccggcgaccacacggccgtctgccgcaccgtggttgcgatagtggaacatcgagatgttccagcgcccgcccaatttgttaagaaagttgaacaaggcccccggacgctccggaaactcgaagcgcaacaccacttcatcgctaaccttggccgcatgcccgccgaccatatgacggatatgcaacttggccagttcgttctcggtcaggtccagcaccgggaaaccctggctggtcaggctggcgatcagggcactgcgcggatcgttttccgggtgggtctgcacgccgacaaagatgtgcgcctcgctgccggagtggtagcgatagttgaattcggtgatctggcgtttacccacggcctcgcagaacgccttgaagctgccgggcttctcggggatggtcacggcgatgatggcttcgcggccttcacccagctcggcgcgctcggccacatggcgcaggcggtcgaagttgacgttggcaccggagtcgatggcgaccagggtctgcccggtgacaccacgggtttcaacgtacttcttgatcccggccacgcccaaagcccctgccggctcggtgatggaacgggtgtcgtcgtagatgtccttgatcgccgcacagatctcgtcggtgctcacggtgatcacttcatccacatagtccttgcagatgtcgaaggtgtgctggccgatctgcgccactgccacgccatcggcaaagaggcccacagtcggcaacaccacgcgctcgccagcagccatggcggcttgcaggcagttggagtcgtccggctcgacgccgatgatcttgatctccgggcgcaggtatttcacgtacgccgcaatcccggcgatcagcccgccgccgcccaccggtacgaaaatcgcgtccagcggccctggatgctggcgcaggatctccatcgccacggtgccctgcccggcaatggtgtgcggatcatcgtaggggtggatgtagacgtagcctttttcgtcgaccagtttcagcgagtaggccagggcttccgggaaggaatcgccatgcagcactactttgccgccgcgggagcgcacgccttcgaccttgatttccggcgtggtcttgggcatcacgatggtggccttgacccccagcaccttcgccgccagggccaggccctgggcatggttaccggcagaagccgtgaccacgccgcgcgcacgttcttcggcgctcagttgggtcagcttgttgtaggcgccgcgaatcttgaacgagaacaccggctgcaagtcttcacgcttgagccagacctggttgcccagccgctcggagagctggcgggcggtctgcaacggggtttctacggcaacgtcgtaaacgcgcgaggtgaggatctttttgacgtactgttcaagcatcggcggatatcactgggcgggttgggcagggccaaggagtctaacccagcgtttgggcgggcgaccacacgaatccagaggttttgttgggttatactcgcgcccctcgataactccccgcccgttccggagcccgcatgacccaggatcaactcaaacaggcagtggcccaggccgctgtcgatttaatccttcctaaactcgacgacaagagcatcgtcggtgtcggcaccggctccaccgccaactgctttatcgatgcactggcccagcacaaaggcgcgttcgacggcgccgtggccagctccgaagccaccgccgcacgcctcaagggccacggcattccggtgtacgagctcaacaccgtgagcgacctggagttctacatcgacggcgccgatgaaagcgacgcgcacctgaacctgatcaagggcggcggcgcagccctgacccgcgagaagatcgtcgccgccgtggccaagaccttcatctgcatcgccgacgccagcaagctggtgcccgtactcggcgccttcccgctgccggtggaagtgatcccgatggcccgcagccacgtggcccgcgagctggtgaagctgggcggcgacccggtgtaccgcgaaggtgtgctgaccgacaacggcaacatcatccttgacgtgttcaacatgcagatcaccaatccggtggagcttgaaactcagatcaacgcgattgtcggcgtggtcaccaacggactgttcgcggcgcgtccggccgatgtgctgctgctgggcaccgccgaaggcgtcaagaccctcaaggcctgagaacaccgctgagctaaggtgggagggggcttgcccccgatgagggagtgtcagtcaacggatgcttggctgatacaccgctatcgggagcaagccccctcccacattggttcagcggggcttcttgaagacgtagaacaggttcggctcgctgacgaggtacaacgcgccctcgtcatccatggcgatgccttcggcctgcggcactcgcttcgtcaggccatggcgcccgttgagcagtgacagactgctcagcgggcgaccgtcgatatccagttccagcaccaggaacgactcatccgacagcgccagcagatggccgctgcgctcatcgtattgcaggctcgacaggtcacgcacaaacaacccggcgtcgcgcttggggttattgatcacgtgcaccgagtaggttttttccggtttgaaatgcgggaagccatgcacctcatagatcagcatcgggtcgcgctccttggccacgaacaggcgcttgcccaccgagtcgtaggccaggccttcaaagcccttgttgccaccgacatgcacacccagggtcatctgctccgcatcagcggcgtcgaggaattgggtatcgtcgtccacgtgcaccttgatcagccgctgctggcgctcatcgctgatgacatagatgttgtcgctgatgaactccacggcttcggcatcgccaaacccgatcaaggggatgcgtcgcaggatcttgccttccagggacaactcgatcagctcggcgtttttattggtgacggtgaacaggcttttgcgcaccgggtcgtaggttagggccgacacatcgtcgtcgagcccctcaatggcctgagcctcaagcgtgacgcggtagtccgccagcccgatggagcgttcgtccgctggctggcgccatacctgccaattgaaccaggtgcgttcaaacagacgaaaatgctgcgcaacggccccggcgctgaccagggtgatcagcgcaagcatgataaacaggggtttggggcgggctagtcgttgcatcgggcgggctcaaagtcaaaagtggcgaatgaatatcacgcccgtctgaatttaaacttaaacacgcccggatgtctggcagatgccgctcacagagacctatctgacgtaatcggtgtgctatttctgcttttcgaaccggtagaacagattgggctcactgacgatgtacagcgtgccctcctcgtccatggtcaccccttcggcacggggaatggtgtgcttgatgccgttgaaaccgccgagcaaggtcatgaagctgacttgctggcccttctcgtccagctccagcagcaggtgggagtcggccgacagcaccagcaaatgcccggtacgcgggtcaacagccagggccgagagattgcgcatgtccagttctttgctggccagcttttgtttatcgcccgccagggtcaagccgccgtcgcttttccaggtgaacaacgcgggcgggcgctcttcgccaaggatcaactgctggttgcgcttgtcccaggtgatggcttcgaaggccttattctggtccttggacgggccgaggtcatagctggtgaagtcggccttgttcagttgggtggtgctcgcatcgaccttgacgatggtcagggtgtgctgccgctcgtcgaccaccgccaacaggccattttccattaccgtcacgccttccgggttgtcccagccgttgagcggcatcttgcgcagcacatcgccttgcaggctcaactccgccaggaacgggtttttgcccatcacggaaaacagggttttggtctgtggattgtaggcaacgtccgacgcttcgtccttctccatccccggcaaaagcttgccatcgatgaccgcatggtagtcaggcagccatacgctctgctggcgttcggccggcgtctcaaagcgctccagcacccacagcacaccgcgatcgtcccagtgcagggcccaggccacgccatacaggatcacccctgtcagcaacagccaggaataccagcgcatggcaaaacgggaacgcggcttgggtgaagcggagggcagggacacggccattgggcgctttttccggaaagtcagcgttaggtgatagcacaggaacaacgggcctgcgcgcacgaggctgaggattatccggatggcgtgtgaaaaaaatgcaaaagcctgagatgtgggagggggcttgcccccgattgctgagtgtcaggcaacagatgtttgactgataaaccgctatcgggggcaagccccctcccacaatgttgaccgcgttttgtcagtgcttaacgaacaacgctttcaaagcgattctggcccgccagttccagcaccaactcatcccccacattcaacgggcctacaccggccggcgtgccggtgaggatcacgtcgcccgcctgcagcgagaagcagccggccatgtgctggatcatcgggatgatcgggttgagcatctgcgcgctgttgccgtcctggcgcacttcgccattgatgctcaggcggatgccgatgtcggtgacatcggcaaaggtgctgcccaccacgaacggtgcaatcaccgccgcgccgtcgaaggacttggcgatttcccacggcaggcccttggctttcagctcggcctgtttgtcacgcagggtcaggtccagggccggggcgaagccggagatagcgtccagcacttcttcacgactgggcttgttcgacaaaggcttgccgatcaacaccgcgatttccgcttcgtaatgcaccgaaccgcgttcggtcgggatgctgaaaccaccttccaacggcaccacacagctgcccggcttgatgaacagcaacggctcggtcggcgccgggttatccagttccttggcatgttcggcgtagttacgcccgatacacaccactttcccgaccggaaagtggatgttggtgccgtcgacatacttgtgctggtagctcatggaacgactccttcagggcggttaaacagcgaagatcttgccagggttcatgatcccgttcgggtcgaacaccgctttcactgccttcatgtattcgatttcaaccggcgagcggctgtaggtcaggtaatcgcgcttggtcatgcccacgccgtgttcggcggagatcgaaccgttgtacttcgcgacggtttcgaacacccacttgttcacggtggcgcacttggcgaagaactcgtccttgctcaggttttccggcttgaggatgttcaagtgcaggttgccgtcgccgatgtggccgaaccagacgatttcgaagtccgggtagtgttcgccgacgatcgcgtcaatttccttcaagaacgccggtactttggagacagtcaccgagatatcgttcttgtatggggtccagtgggaaatggtctctgagatgtactcgcgcagtttccacaggttgtgcagctgggtttcgctctggctcatcacgccgtccagcacccagccctgctccacgcaatgctcgaaggtttccagcgcgtggttggcgacttcttcggtggtggcttcaaattccagcagcgcatagaacgggcagtcggtttcgaacggcgccggcacatcgccacggcccatgaccttggccagggccttgtcggagaagaattcgaaggcggtcaggtccagtttgctctggaacgcgtgcaagaccggcatgatcgagtcgaagtcagtcgtaccgagcaccatggcggtgaggttcttcggcgcacggtccaggcgcatggtggcttcgaccacaaagcccagggtgccttcggcgccgatgaacagctggcgcatgtcgtagccggtggcgttcttgatcaggtcgcggttcagctccagtacgtcacccttgccagtgacgacctttatgccggccacccagttacgggtcatgccgtagcgaatcaccttgatcccgccggcattggtgccgatattgccgccaatctggctggaccccgacgaagcgaagtccaccgggtagtacaggcctttttcttcggcgacgttctgcaattgcttggtgaccacacccggctggcacacggcggtgcggtcggtgaggttcacgtcgaggatctggttcatatagtcgaacgacaccaccacttcgccgttggccgccacggcagcggccgacaggccagtacgcccaccggatggcaccagcgcgaccttgtgggtattggcccaacgcacgatggcctggacctgctcagtggtcttggggaagacgatggcggtcggcgcgggtgcgaagtgcttggtccaatccttgccgtaagcctccagggagtctgcatcggtcagcactttgccgggctcaaccagggtctttagctcatcaatcagggcaggatgggtcatcgacagaactctcgaacaattcatggtcatcctgagaacgcttcacgtcgcaggaatgagtgtttagcggggcgcgtatgctagcataccgcccccgcaggacagagcccaagggcgtttctgcggtgacggctttcctgccgtccgggtcagcttaagcgatccgattccctgccatttttctccgggatacaggtttacgcagatgagcaagacttctctcgataagagcaagatcaagttccttcttctggaaggcgtccacccatcggccgtcgaagttctgaaggccgccgggtactccagcattgagtacatcaccagttctctgccggaagcccagctcaaggaaaagatcgccgacgcgcactttatcggcattcgctcccgcactcagctgaccgaagaaatcttcgatcacgccaagaaactcgtggcggtcggctgtttctgcatcggcaccaaccaggtcgacctctctgctgcgcgcgagcgtggcatcgcggtgttcaacgcaccgtactccaacacccgttccgtagcggagctggtgctggccgaggccatcctgttgttgcgcggcattcccgagaagaacgcttcctgccaccgtggcggctggatcaagagcgcggccaactccttcgagatccgtggcaagaagctgggcatcatcggctacggctcgatcggtacccagttgtcggtcctggctgaaggcctgggcatgcaggtgttcttctacgacaccctgaccaagctgccattgggcaacgccacccaagtggccagcctgaccgagctgctgggcatgtccgatatcgtgaccctgcacgttccggaaaccgctgagacccagtggatgatgggcgagaaggaaatccgcgccatcaagaagggcggcatcctgatcaacgcggcacgcggtactgtggtcgaactggacgccctggccgacgcgatcaaggacaagcacctgatcggcgccgccatcgacgtgttcccggttgagcctcgctccaacgacgacatcttcgaaagtccgctgcgtggcctggacaacgtgatcctgaccccgcacatcggtggttccaccgctgaagcccaagccaacattggcctggaagtggccgagaagctggtcaagtacagcgacaacggtacctcggtatcgtcggtgaacttcccggaagtggccctgccggctcaccctggcaagcaccgtctgctgcacatccaccagaacatccctggcgtgatgatggagatcaacaaggtcttcgcggaaaacggcatcaacatctccggtcagttcctgcagaccaacgagaaggtcggctacgtggtgatcgacgtcgacgccgagtactcggacctggcgcaagagaagctgcagcacatcaacggcactatccgtagccgcgtgttgttctaaggtttcaaccgcaccacgaaaaagggagcccctcggggctcccttttttgcatctgaacaaatcttacttgacgttaaccgtgatcactttcgaggctacagtgggctcgaactggcggtgcacgttatcgcccgctaccagctgcaaggtgtgtttgcctggggtcaatgtcagctcggtttcggtttgcgccttgccgaaatgaatcgaggtggcagtggccgggatagcctcgtctgctttgagcgacgtcacgtcctggtcgaccagcaggtgatggtgaccggcaccgggcacctgcttgtcgatcggttccaggtccagacccttcatgccaaatttgacggtgaaggtcttgtcgacggtcgcgccatctttgggcgatacgataaacacctcggcgcctttgggggcgggggtgcgcggaacatcagcagcattcgccaacatcgaagcacccagcatcagggaggccagggtggcacgggacaaaagggctttcattcgcttctccagtttttctgtgaaatctgtagggttatgacaacttcgcgacaaattgctgtccaaggcactcaacaccatagcaaagcgatgctgaccggcgcctcgcacataaaaattctctaggagtgaccatgcgcttttcgcctggcctgttactgctgcttccccttctgagccccctggctcacgccgaactggtcgatgatgtgttcgatcgtggcgaactgcgcatcgcccttgaagccaatacgccaccgttcaacttcaaggacggcgacaaactcaccggttttgaagtggaactgggtgaactgctggccaaggaaatggacgtgcgctcctcgttcatcaccaccgatgacgccgacttgctgccaggggtggcaaccggcaagtacgacgtggccatcaaccatatcgctaagactgccgaccttgaggatcagttcgatttcagtgaggcttatcgcgagaagcccgatttggtgatcccgttccaaaagggtaacccggcgttcaagacgagcctggacggcgcgctgaagcgggtgaaggaggatggccggttaaaggcgctgtcgcagaagtggtttgacgcagaagccccgactacaactgcgccagtgcctgcgcagcctcaggtaactccaactcactgaacacctgcacgccgtggcgcttgagcagcgccgcggttacgccctcgccactcactttcacgccggtaaaggtaccgtcataggtgagcaggttgccgcaggatgggctattggccttgagcacggcgatgcggatagcgtggcgttcaaccagcgccagtgcctggcgggcgccatcaaggaacgctgcgctgaaatcttcgccctcagccgtcagcacctgggcacgcccctcccacacatccacgccctgcccgcctgggatctcggcagcaggtcgtggcgttggcaaaccacccgacacttccgggcagatcgcaaccacacgcccttcggcctgccacgccgccaattggtcgaacggcccgctggccccgccgtcgtaacgcaccttgtgcccgagcagacagcggctgatcagaatcttttgcatgtttaaaacggctcgttgccccgccggcgaaaccagccggtgagggacaggcgttcgcgcgtagcgggcatcacttcgtggggcacctcgcccgacaggaacaccaccaggcaaccgccggtgggcaccacatcgtattcgacgccgtccttgaggtacatgcgcaactggccgccatgttcgggcagccaggcgtcattcaagtagatcaccgccgagaccatgcgccggtcatcgtcgcggaaacggtccaggtgcttgaggtaaaaagcccccggcgggtacatcgcgaagtggctctcaaagtcttccaggcccaggaacaggccacggttcatggcgaggcgcaggctgtccatcaccgccatgtaagtgtcgcaaaccgccgcatcgccctcttccagccactggatgtggtcaccgcgaatgccttctcgaatctcctgggtcggcccccgccctaccgctgccggggccagttcaccttcggccttgcgtttacggcactcagccgccagttccagggtcagagcctggggcaggaagccgtcctgtcgcgaccagcccttttcggccaggtcgtcgacaatacgttgcagcaaggggtgatcgaggggtatttgcatggcgcgcatagtatccatacgcctgtgaatccgacagagccgccgagcgtctgaatgcactttagtcaggtgactgataggacttctcgacaaatcctacgcccgacacggacaatagtggccgactgacaggagtccctatgcgtcgtttgtttttttccttgctgatgttctgcgttttgcccgcctgggcagacggccatgaccagttgtacaaggtcgccggctgggccgaacaacgtgcgcatttcaatgacgccctcagtgccgcccagcaacgctaccgcaatagcctgccgccagcggtgtaccaggcgctggtggacaacagcaataaacgcttcgccgcccaggcggtggaccagcgtgccgaagcgcaattgcgcaagcacctggcggaccctgcgcctgccttggcgtttttccaatcacccctgggccgcaagattgtcgccgccgaattgctcgccacccgccgcgaccaactggcgaaaaatgcccagggcctgccgaaaatcgaggccgacgccacccgcagcctgatcatcggccacctggcccaggccctgccggcccgcgaagccggcgcggaagtcagcctggcgattgccggcgtggcggccgacagcctgagccagatgatccccggcctgctgggcggcggccaggcccagggtatgttgaatggccaacgcgagcggttgatgcagcagatcgacaaggacctgaacaacacgctgctgtacgtttatcgggatctgtccgacccggagctggaagaattcgcgacgtttgcggagtcgccggagggcaaggcgtattaccaggcggcacttgccgctattcgcgccgggctggcggtcgggcaaagcacttccagccttacgcagtaaaaagtgtgggagggggcaagccacctcccacatttggatcgcgttagttcaggtgacgggtgagatagctgaagtactgctcacgaatctccggaatctcattggccagatgatgcctgccacgcggcagcatcaacacctcgggctggtcgaacttgctgcgcaacacctgcaggttgtgctgccaatccacggtcatatcctcttcaccctgcacaatcaccggtcgccgagggctgcgcggtgcggcttcgatgcgtttgatccagcgcgccaatgcacccacccaggcggtcggcaattgccgcggctgcagcgggtcgacttcaaggaacggtttgaacgcggggtcgtgggtgttttcgctgaaccgccgcgcaatgcctttgacgaatgggcgcagcaggtaataactgacctgcgaccaaccccaggcacgcggccgcaccaacggtgacagcaggaaggtcttgccctgggccgggctgtcggcgccgtggttgagcaggtggtccaccaccaccgcgccgccggtgctttgcccgaacaggtgccagggttgcggcaactgcaatgcttcggcctgggtaaacagcgcccgcaccacgtgctggtacaccgcgaaatcatcgatgctggcgcgtgcgccgctggacagcccatgcccgggcagatcgcaggcgatcaccacaaaaccctggtccagcgcccacttcaccacatggcggtacaaccccatgtggtcgtagaagccgtggaacatgaacatcgtcgctacaggcctgggcggccaccacacctgcgcgaccacctcgaaaccgtccacctcgaagcgccccaggcggctctcggcctggtccagcccgtagaaacgctggtagacccgtgcctcggctgaaagcggttgcgcatccaccaggggccgcaagctttcgcgcagatgatcggggtcaaaggtaacgggcataaaggcttccagactggcggcgaagatgaatatcgagctgcgatattcatctgtcaggacaagcatggcaagctacgcgaccttcgaggatacatctgaatgcgaccgccctaccgcaccgccctattcgccagcctgatcctggttatctgcgtcggcgtgctgtgggcggcgtatgactggttccagggccgctacctgcgcgccttcagcgaacacacggcggtgttttccggcgacccattgaagctgcccgccgacctcgccggccccggcccgatccgcctggtgcacttctgggacccggcctgcccgtgcaacgtcggcaaccagcagcacctgggcgagctgatcgagcaatacgcgccccaaggcgtcgagttctacgccctgcaaaagcccggcagccacggccaactgcccgacaacctgcgcacgatgaaaaccctcaccaccctgcccggcgccgaccaggtgccggccagcccggccgtggggatctgggatcgcacaggcaagctcgcgtatttcgggccctacagcgagggcctcacatgcaactccagcaacagcttcattgagccgatcctcaaggccctagacgcgggacgccagataaatgctactcacaccctggcagtgggctgctattgttcgtggccaaaaggctcgtaacccgcctctctcttggtaaggaatattcatgaagcgcgtcttgcaggtgttcgcggttctggtcgtgctggctgcccttggcgcaggcgcgtacgtctatagcaaacagcccacccgccagggcacggtgacgctggccaacctgcaaggctccgtcacggtgcgctatgacgaccgtggcgtgccgcatatccgcgccgagaacgaaaacgacctgtatcgcgccctcggctatgtgcatgcccaggaccgtctattccagatggagatcatgcggcgcctggcgcgtggtgaactggccgaggtgctgggccccaaagtgctggagaccgacaagctgttccgcagcctgcgcattcgcgaccgcgccgcgacctatgtggcgcaactggatcatgagtcggcgcactggaaggccctgcaggcctatctggacgggatcaaccagtatcaggacagccacgcccgcccgatggagttcgacgtgctgggcatccccaagcgaccgttcaccgctgaagacaccatcagtgttgccgggtacatggcctacagctttgccgccgcgtttcgtaccgagccgttgctgacttacgtacgcgaccaattgggcagcgactacctgaaagtcttcgacctcgactggcaacccaagggtgcgctcaacctcgccgccagcgattggcagaccctcggcgccctcgcctcactgagcgaacaggccctggccgacaacggcctgccgcagttcgaaggcagcaacgcctgggccatcagcggcaaccgcaccaagagcggcaagccgttgctggcgggtgacccgcatattcgtttctcggtgccatcggtgtggtacgaagcgcagctgtcggcaccgggttttgagctgtatggctatcacaacgctctggtgccgatggcgttcctgggacacaacctggacttcggctggagcctgaccatgttccagaacgatgacctcgacctgatcgccgagagggtcaacccggacaatcccaaccaggtctggtaccacggccagtgggtcgacatgacccgcaccgagcaacagatcgcggtgaagggccaggcgccagtgacgttgaccctgcgccaatcgccccacggcccgatcatcaatgacgtgctcggcgagaacgccggcaacacaccgattgctatgtggtgggcgttcctcgatacccagaacccgatcctcgaaggcttctaccaactcaaccgcgccgacaccctggccaaggcgcgagccgctgcagccaaggtctccgcgccgggcctgaatatcgtgtgggccaacgccaagggtgatatcggctggtgggcggcggcgcaattgccgatccgcccggccggagccaaccccggtttcatcctcgatggcagtaccgaacaagccgataaactgggcttctaccccttcaccgccaacccccaggaagagaacccggtgcgcggctatgtggtgtcggccaatgctcagcccgtgtcacccaccggcatggaaatccccggctattacaacctggccgaccgtggccagcagttgaatgcgcagttgagcgacaagagcgtgaagtgggacgtgaacaacagccaggccttgcagctgggcaccaccaccgctttcggcccgcgcctgctggcgccgctgctgccggtactgcgtgaggtggtcaaggacccggcgcagctgaaactggtggagcagcttgccagctggaagggtgactacccgctggactccaccagcgccacgctgttcaaccagttcctgttcaacctggccgacgcggccttccacccgaaactcggcgacggcatgttcaagaccctgctcaccacccgtgtgatcgacgccgcgctgccacgcctggccgccatgccggattcgccgtggtgggacggcaagcgcgctgacaccgtcaagctcgcctgggacaacagcctcgcgcacctcaaggccacccttggcgatgacccgagccaatggcagtggggcaccgcgcataccctcacccacggtcatccgttgggcatgcagaagcctttggacaaggtgttcaacgtcggcccgttccctgccccgggcacccatgaagtgccgaacaaccagtcggccatgatcggcccggcaccgtggccggtcacctacggcccctcgacccgtcgcctgatcgatttcgccgacgtggcccacgcgctgaccatcaacccggtcgggcaaagtggcgtgccgtttgaccgccactacagcgaccaggccgaaacctacatcgaaggtggctacgagcaggcgcacttcactgacgaggaagtcaccgccaacacccgtggcaccctcaagttgctacccgcccgatgaacgcaaacgccccggcgcctcgccataggtttccttgaatttcttgctgaacgccgcctgggactggtaacccacctgggcggcgatatccagcaggctcaggtgtgactggcgcagcaggttgaacgccagctccatgcgcaattgggtcagcagcacccacggcgatacgcccgcgactttcacaaaggcgcgcatgaaggtggcgcgtgacatcgtcgcagcggccgccaggctgtcgatggtccactcataccctggatcggccagcatggcttgccaggccttgctcaggcgcttgtcggtaagcaaggcgaaggtgccggcgaccggtgcctgacgggcgagccaggcgcgcaggatcagggtgaacagcgccgatgacaatgcatcgataaacgagcgggcgccgagttgctggccgtccgcttcgctgcgcaataacgcgatcaacgccgccagttgcccgtcgccgtgccactcgcggctggacacaaccaggtattccggcaacgcgccgagcagcagcgactggcggttgtagtgaaagctgccgcagagcatgtccaggtccggctggtcaccgcccaggcggtgcacggtgagcacaccgccttcgatgaccttgggttgcatcggccggatccgcgcgccctggctgcgcagcaaatgcgtggcaccgccgggcatcagcaaaatatcgccgtgctccagggtcacttgctgcccacccgacaactcggcgcggcaggtgccactgagcacgatgtgatagggcgccatacccaggctttccggcgcatggtccaaggcccagtcgccctggaactggcagcgcagatccagactgccgcgcaggttggccagcgcgataagcgtgtcgatcgaattcatttgcgagcatcggtcaaaaacatgagcggattgaacaataacgccgcccccgaacggaagacactggctccacaccaccctacccgttcaggagttaccgcaatgttcaataactggtccgacttgctgcctaccgtgaagaaagcctttggcgcgctgggcaagagcaacccgaagatggtcaaagcctacatggcgctgggcgaagctgccgaggaaaacaacgtcctcgatgccaagacccgtgaactgatttccatcgccgtggccattaccacccgctgcgacggttgcatcggcgtgcatgccgatgcggcaatcagggccggcgccacccgcgaagaagtcgctgccacgctggccactgcgatctcgctgaatgccggcgcggcgtacatctactcgctgcgcgcgctggaagcctacgacacgctcaaaccggcgccgcaaagttaagccggaactgttgcggcgtcacgcccagccgacggttgaacacactgcgcatgtgctgggcgtcacgaaatccgcattgataggccacggtcttcagcggtgcggggctgctttcaagcatcacccgcgccgcgtccacccgcgcgcgctcgacaaactccgccggcgtgatgcgcgcctcgcgggcaaacacccgggagaaattgcgcgcactcatgttcgcggccttggccaggtcggcaatggtcaggtccccggtcaggttcgccaacacgtacaactgcaccagcgccaccgccgaggtggtttcggcgtggggcgtcagaaacgggctgaactgcgactgcccgcccgaccgctgggtgaacaccaccaggcgcttggccacgctcaacgcgacttccgggccatggtcctgggccagcagatacaacgacagatcgatgcccgccgtgaccccggccgaggtgtagagattgccatcctgtacgtagaggcgatcggcttcgacctgggccgtggggcacaggcgcgccagatccgccgcatcgttccagtgggtggtgacggttttcccgtccagcagcccggcgcgggccagcatgaaggcgccgttgcagatggagccgaagcgctgcgcacgcgccgtggcaccacgcagccaagcatcgaactcggcgccgaagtcttcgaagggtaactgcggaccacccgccaccagcagcaggtcatagggctcaagggcatcgctgtagtgccggtgggcctgcagcgacagaccgttggaagcggccatgttgccgtgaccgaagccgatgacttccaactggtaatgatcctgcggcggcagaaaacggttggcttcgcagaacacgtccatgggaccggtcacgtccagtgactggacgccggggaagatcaggatggcgacggttttgctcatgagcaggcacaccttctctaactggataaacacagaacccctgtgggagctggcttgcctgcgatgcagacgcctcgatcattcaggtataccgagtcgatgctatcgcaggcaagccagctcccacatttgaccgaatacacctttggcacgatgtacaaccacattggccgggattgctccctcgccgcaatggccccttcgctggcacaagaccagactggaatctttccagaggagaacgaccatgagcaccaccatcgccggcatccagatcccggacagcgccctggccaaggccaccaccgaatacatccgcgacgtcgaatccgacctgctctaccaccactcgcgccgagtgttcctgttcggcgccttgagcggtgaacgcaagcaactggcctacaacccggagctgctttacgtcggcgcgatgttccatgacttgggcctggtggagggccatcgcagtgacaacgagcgcttcgaagtcgacggcgccaacgccgcagccgcgttcctcaagccgtacgggctgagcgatgacgatatcgaacaggtgtggctgtccatcgccctgcacaccacgccgggcgtgccgcagcatttgcgcccgaccgtggcactggtgacggccggtgtggaaatggacgtgctgggcatggactatgccgcgttttccagcgtgcagcgcgaagccgtggtgcatgcgcatccacgcggtgaagggttcaaggagtgcatcatctgcgcgtttgccgacggcttgcgccatcgtccgcagaccacgtttggcaacgtgaagacggatgtgctggtggatcaggagccggggttcaagccgatgaattttgttgaagtgatccgcaagtcgccgtgggtcgcatagttgacttgaaatgcaatcaaatgtgggagggggcttgcccccgatagcggagcatcagccacatatccattggctgacacactgtcatcgggggcaagccccctcccacatttagaccggtgcagccgcccggcgcttgtccggctgctgccagccatccgccgcggcttcttcgatggcttgctgaatggccttcttgcgcatctcttcggcacgccggctgaagaaccacaccaggaaggtcaccagcgacaccgccagcaggatcaggctggccacggcgttgatctcgggtttgaccccaaggcgcaccgccgagaacacttccatcggcagggtcgtcgaacccggccccgacacgaagctggccagtaccaggtcatccagggacagcgcgaacgacatcatgccgcccgccgccaacgacggcgcgatcatcgggatggtgatcaggaagaacaccttccacggtcgcgcacccaggtccattgccgcttcttcgatcgacaggtccaattcacgcaagcgcgccgacaccaccaccgccacatacgccgcacagaacgtggtgtgggcgatccagatggtgacgatgccacgttcctggggccagccgatcatctgcgccatggccacgaacagcagcaacagcgacagaccggtgatcacttccggcatcaccaatggcgcggtcaccaggccgccgaacagcgtgcggcctttgaactggctgatgcgcgtcagcacgaaggccgccaacgtacccagcgccaccgccgccaccgccgtgtagcaggcgatttccagggaacgtgccaccgagcccatcaactgagtgttgtccaaaaggcccacgtaccacttgatcgaccaaccgccccacactgtcaccagtttggattcgttgaacgagtagatcaccaggatcagcatcggcaggtagataaacaacaaccccgccaccagcatgaaactcgagaaactgaagcgcttcatatcttgccctccatctctttggcttggctgcggttgaacaggatgatgggcacgatcaggatcgccagcatcaccaccgccagggcagaggccaccggccagtcacggttgttgaagaactcttgccacaacactttaccgatcatcagggtttccgggccgccgagcagttccgggatcacgaactcgcccaccactgggatgaacaccagcatgcagccggcgatgatgccgttcttggacagcggcacggtgatcttccagaagctgttgaaggtgctcgaacccaggtcggatgcggcttccagcaggctctggtcgtgtttcaccaggttggcgtacaacggcaggatcatgaacggcaggtacgaatagaccacgccgatatacaccgcaatgttggtattgaggatctgcagcggctcgttgatcaagccgatggacatcaggaagccattgagcaggccgttgttgctgaggatgcccatccacgcatacacgcggatcaggatcgcggtccaggtcggcatcatgatcagcagcaccagcacggtctgcatctctttgcgcgcgctggcaatggcgtaggccatcgggtagccgatcaacaggcacagcaacgtgctgaagaacgccattttcagcgagcccaggtacgcagcgatgtacaactcgtcgtcgccgagcatcgcgtagttgcccaggttgagcaccaattgcagtttctgctcaacgaaggtgtagatctcggtgtacggcgggatcgccacgtcggcttcggcaaagctgatcttcaggacgatgaagaacggcagcatgaagaacaggaacagccacaggaagggaatgccaatgaccgcatgacggccactgggcgttattcgttgcaggcggcgcttgagcttcttcatgttcatgagcgcagtaccacgccgctgtcgtcttcccaccacacgtacacctggtcaccccaggtcggccgctggccgcgacgttcggcgttggccacgaaggactgcaccagcttgccgctcggcagctccacgtagaacaccgagtggccgcccaggtaggcaatgtcgtgcaccttgccgctggaccagttgtgctcgcaggtcggcatttcggtggtgaccagcagtttttccgggcggatcgcgtaggtcaccgacttgtcttccaccgaggtggcgatgccgtagcccacatagatgtcgcggtccaggtcggcgcacttgagcaccgcgtggccttcggcatcgtctaccacctgggtatcgaagatgttgacgttgccgatgaactcgcacaccaggcggctggtgggcgtctcgtagatgtcgatcgggctgccgatctgggcgatccagcccaggtgcatgatcgcgatgcgttcggccatggtcatggcctcttcctggtcgtgggtcaccattacgcaggtcacacccacgcgctcgatgatctccaccaactccagttgcatctgcgaacgcagcttcttgtcgagggcgcccatgggctcatcgagcagcagcagtttcggacgcttggccagggaacgggccagggccacacgctgacgctggccgccggacaactggtgcggcttgcgcttggcgtactggctcatttgcaccagcttgagcatctcggccacacgggcgtcgatctcggccttggggatcttgtcctgttgcaggccgaacgcgatgttctgcgccacggtcatgtgtgggaacaaggcgtaggactggaacatcatgttgatcggccgctcgtagggcggcatgtcggtgatgtcttcgccatcgaggtagatgcgaccctcggtcgggcgctcgaaacctgcgagcatgcgcagcaaggtggacttgcccgaacccgaaccgccgagcagggcgaagatctcgcccttcttgatttccagggacacatcgtccacggcaatcgtctcgtcgaacttcttcgtgacccggtcgattttgaccagcaccttcttcggtgtctggtccccttcgagggctttcttataggcgccggaggcaactgccatttacgaaactcccagaaaaaaaagagtgcagcggacccaatgcgggcctgccttggatagtttgagccttacttgcccgtcttgaccttggtccagctacgggtcatcaagcgttgcactttcgggggtagctcgaagttgacgaaggtcctgtcgagtaccgcctgcggtgggtaaaccgcttcgtccgtgcgtatcgattgcttcatcagtttgtccgcccctgggttagggttggcgtaaccgacgtaatcactgacctgggcgatcacctcaggttgcagcaaatagttgatgaaggcgtgggcctctttgacgttggtggcatccttggggatggccagcacgtcgaaccacaggttgccgccttccttcggaatcgcgtaggcgatgttcacgcccttgcccgcttcgcttgcgcgagccttggcctggaacacatcgccggagaacccggcggccacacagatgttgccgttggccaggtccgatatgtacttggaagaatggaagtaggtcacgtagggccgcactttgagcagcttggcttcggccttcttgtagtcttccgggttctcgctgttggggttcaggcccatgtagttgagcactgccggcagcatttcatccgccgagtccatgaacgacacgccgcaggtcgccagcttcttcatgttctcaggctcgaacagcacggcccaggagtcgatatggtcgatgcccagcacttccttcactttatcgacgttgtagccaatgccgttggtgccccacaggtacggcacggcgtactggttgcccgggtcgttcttttccaggcgcttgagcagcgccgggtcgaggttggcgtaattcgtcagcagtgacttgtcgagtttctggaatgccccggccttgatctgcttgcccaggaagtggttggacggcaccaccacgtcgtagccggtacgcccggccagcagcttgccttccagggtttcgttggagtcaaacacgtcatacacgggcttgatgccgctggccttttcgaagttggccagggtgtcggcgccgatgtaatccgaccagttataaatatgcacagtcggtgcggcctgcacgctcaacgtcagcgtgatacctgcacccaccagcaaggctttgcgaaataaagaaattggcaagtggaggtcctcttaaatagttgggccttaaagttgttgcccggcaacaaaaccggcgcgcaacttaccctcgataaaccgatccggcaaaactttctgtcatttaatttgtgagaggggcagtcaaactgcccctccacaggtttcagggcttatttgcccgatttgatcttggtccagctgcgtgtcatttcacgctgggttgcagccggcaggtcggcaatcgcgtagagcttggcctgcacatccgctggcgggtagatgcccgggtcgctggtgatgtctttgtcgaccagtgcggtggccttctcgttaccgttcgggaagcgcacgctatcggtgatcttggccatgacttccggcttgagcaggtagttcatgaacttgtaggccgcgtcgacgttttcggcatccttagggatggcgaccatgtcgaagaagctgccagcgccttctttcggaatgtcgtaggccaccttgaccttgccaccggcttcagccgcacgggacttggcctgctggatgtcacccgagtaccccacggccacgcagatgttgccgttggccaggtcggagatgtacttggacgagtggaagtagccgatcgaaggacggatcttcaggaacagcgcttcggcctgcttgaggtcgtctttcttctggctgtcggtcggcaggcccaggtagtgcagcgcgatcggcagcatttcggttggcgaatcgaggaagctcacgccgcagcttttcagcttggcgatgttctcaggcttgagcagcacgtcccacgaatcgatcttgtccacgcccagcgcggccttgaccttctccgggttgtagccgatgccgatcgaaccccacatgtacgggaaggcgtgcttgttgtccgggtcgctgaccgacacggctttaagcagggatttgttcaggttgtcgtagttggacagcttggacttgtccagctcttggtagacaccagccttgatctgcttggcgaggaagttgttcgacggtacgacgatgtcgtaaccggacttgcctgccagcaacttggcttccagggtttcgttgctgtcaaaaacgtcgtacaccaccttgatgcccgactctttttcaaagttggcgatggtgtccggtgcaatgtagtcggaccagttgtacacgtgcagcactttatcgtcggcctgggccgcgcccgccattgcgcccatcagggacaaggcgaggagggtcttgccagcgttcttcaaacctaatgccttcatttggtgatgctccaattttttcttttttgggccacaagctttttatgttgagtagcccagccaaagggcaacaaaacagggcgacagtctggcaagttccgaggccggctttcaaccaaagcctcatttataactgcccaggacgcagcgcccgaaagccgctgcgttctgagcctagcacttagccctgcaatgccgccaaagtcaggtccaggcactggcgagccttggtcaccagctcgtcgatttctgccttgctgatcaccagcggcggcgaaatgatcatggtgtcgcccacggcgcgcatgatcaggccattttcgaagcagaacgtacggcagatcatcccgacgcccttgccttcgtagcgtttgcgggtggccttgtcctgcaccagttcaatggcaccgagcatgcccacgccgcgcacttcgcccaccagcggatgctccgccaattccctcagacgtttctgcaaatacggtgccgtttcgtcgtgcacacgcttaacaatttgctcatcgcgcatgatgcggatgttttccagggccactgcagcggccaccgggtgaccggagtaggtgaagccgtggttgaaatcaccgccttcgttgaggaccgccaccacgtcatcgcgcacgatcaggccacccatggggatgtaacccgaggtcaggcccttggcgatggtcatcatgtgcggcttgaggtcgtagaaatcgctaccgaaccactcaccggtacggccgaaaccgcagatcacctcatcggcaataaacaggatgtcgtacttggcgaggatttccttgatgcgcggccagtaggtgtctggcggcacgatcacgccaccggcaccctggatcggctccgcaataaacgcacctacgttgtccacgcccagctccaggatcttttcttccagctggttggcggcccacacgccgaattcttccgggctcatgtcgccgccttcgccaaaccagtacggctgggcgatgtgggtgatgcccgggatcggcaagtcgccctgttcatgcatataggtcatgccgcccaggctggcgccggccaccgtggagccgtggtagccattcttgcggctgatgatggttttcttgttcggctggcccttgatcgcccagtagtggcggaccatgcgcaacatggtgtcgttgccttcggaaccggaaccggtgaagaacacgtggttcatgccggcaggtgcgatgtcggaaatggccttggccagttccagcaccggcgggtgtgcggtctggaagaacaggttgtagtacggcagttctttcatttgcttggcggcggcgtcagccagttcatcgcgaccataaccgatcgccacgcaccacaggccggccataccgtcgaggatcttgttgccttcgctgtcccacagataaacgccgtgggctttggtgatgatgcgcgggcctttctctttcaattgcttgaagtcgctgaacggcgccaggtggtgatcactgctcaaggcttgccattcacgggtttgcgggttgttgctggacataccaatctcctagacttttcaggtgagggcgcgctgttcccacagcgcgcccggcgcatcagacggcaaagagcaggaattcccgctcccacgaactgatcacgcgcttgaagttttcatgctcggcccgcttgaccgcgacgtagcctgtgatgaatttctgacccaggtatttctcgatggtcttgctgttttccatgcgctccagggcgtcttcgatggtcaacggcaggcgcaggttgcgccgctcgtaaccacggcccaccaccggcgcgctcggattatggccttcgaccatgccgatgtagccgcacaacaggctggcggcaatcgccaggtacgggttggcgtcggcgcccggcaggcggttttccacacggcggttctgcgggccggcatccggtacgcgcaggccgacggtgcggttttcttcgccccattccacgttcaccggcgccgaggtgtcgggcaggaagcggcggaatgagttcacgttgggagcaaacagtggcagcagttcagggatgaacttctgcaggccgccaatgtggttgaggaacagctggctcatggtcccgtcttcattggagaagacgttcttgccggtggcgatgtcgatgatgctctgatgcaggtgcatcgcgctgccgggctcgccggtcatcggcttggccatgaaggtggcggccacgtcgtgcttgagcgcggcttcgcgcatggtgcgcttgaacaccaggatctggtcggccagggacagggcatcgccgtgacggaagttgatttccatctgggccgtgccgtcttcgtggatcagggtgtcgaggtccagctcctgcagttcgcaccagtcgtaaacgtcttcgaacagcgggtcgaattcgttggcggcttctatagagaaggactggcgaccggtttccgggcggccggaacggccaatcggcggttgcagcgggaagtccgggtcttcgcagcgtttggtcaggtagaactccatctccggcgccacgatgggctgccagcctttgtcagcgtagagcttgaggactttcttgagcacgttgcgcggcgacagctcgatggggttgccttgcttgtcgtaggtgtcgtgaatcacctgggcggtcggctcgatggcccatggcaccaggaacacggcgttctggtcggggcggcagatcatgtcgatgtcggccgggtcgagcaattcataatagatgtcgtcttcgacatagtcgccggtcacggtctgcagcagaacgctttcgggcaggcgcatgcccttttcggcaatgaacttgttggtcggcgagatcttgccccgggtgataccggtgaggtcgccaatcatgcattcgacttctgtgatcttgtggtctttcaaccaatcggtgagctggtcgaggttgttactcataaatgcctctgggctgggtttcctggcatccattaaaggccaggcgttgtttgacgcagcatccgcgtcgttttttcgttcagggtaggagcttacctgccatttgctgctgcgttgcattcctcacgccaaagttgtgcgcaatcttgagcagcatgctgggcgcacgctgttcggtggcagatgaagaggcaaagaagaggtcggcccgggcgtcaagaatattggccggggagcgcgctatcacgcgggaggaatgtacggatgacacagccttgctgaagcaggccaagacgccgttgggcggcaggtgaaacatgaagcaccccggtattattgctgttatgggtttgaatcgagcttagccttgttcatttttttacacaacacccccgtaaaaaatacaacacggcccgctcaagcctgcgagtcctaagccgttcaaacccaaaaaaccgccccaaaaggccccaaaaaagccttcgtggcgcttttttagggcaaaaaaggcctcgcttgacttcggcatgccgttcgggttgactgaaaccagaaaagatcaatgattgatatttttaacaacaaaggtgttgcatcatgtcggtacccccgcgtgccgttcagcttaacgaagcgaacgcgttccttaaggatcatcctgaggttctgtacgtagaccttctaattgcggatatgaatggtgtggtgcgcggcaagcgcatcgaacgcaccagcctccacaaggtttacgagaagggcattaacctgcctgcctctttatttgccctggatatcaacggctctacggtggaaagcaccggcctgggcctggacatcggtgatgctgaccgaatctgttatccgatccccgacaccctgtgcaatgaaccctggcaaaagcgccctaccgcgcaattgctgatgaccatgcacgaacttgaaggtgaacctttcttcgccgatccgcgcgaagtgctccgccaagttgtaagcaaatttgacgacctcggtctgaccatctgcgccgccttcgagcttgagttctacctgatcgaccaggagaacgtgaacggccgcccacaaccgccccgctcgccgatctccggcaaacgcccgcactcgacacaggtctacctgatcgacgacctcgacgaatacgtcgactgcctccaggacatcctggaaggtgcgaaagagcaaggcatcccggccgacgccatcgtcaaggaaagtgccccggcgcagttcgaagtgaacctgcaccacgtggccgacccgatcaaggcctgcgactacgcggtactgctcaagcgcctgatcaagaacatcgcctacgaccatgagatggacaccaccttcatggccaagccttacccaggccaggcaggcaacggtttgcacgtacacatctcgatcctggacaaagacggcaagaacatttttgccagcgaggatcccgagcagaacgccgcattgcgtcacgcgatcggcggtgtgctcgagaccctgcccgcccagatggcgttcctgtgccccaacgtcaactcctaccgtcgtttcggcgcacagttctacgtgccgaactcgccgtgctggggcctggacaaccgcaccgtggcgattcgcgtaccgaccggctcgtccgatgccgtacgtatcgaacaccgcgtggccggcgccgacgccaacccttatctgctgatggcttcggtcctggcaggcgtgcaccacggcctgaccaacaagatcgagcctggcgcaccggtggaaggcaacagctacgagcagaacgaacagagcctgccgaacaacctgcgcgatgcactgcgtgagttggacgacagcgaggtgatggccaagtacatcgatcctaaatacatcgatatcttcgtcgcctgtaaggaaagtgagctggaagagttcgaacactccatctccgaccttgagtacaactggtacttgcataccgtctaaacgacggctgcatcaaatgtggtgagcgggcttgttgtggcgagcaggcttgccctgcgttgggctgcgaagcagccctgaatccagacgccgagttctttcagaaggaactcggtgttttttattggggccgctgcgcggcccaacgcggggcaagcccgctcgccacacatacacagtcgcctcacaggtatggatcatccttatgctctgcgtacaatgcgctcagccttgtaggagacttccatgaccacccgccccgcgccccttcgcaaaccccgcgcccgcagccaggcccggatcgatgcgatcctcgacgccgcccgcaccttgctggctgccgaaggcgtggcgggtttgtcgatctacggcgtggccgagcgggcgcagattccgccgtcgtcggtgtatcacttcttcgccagtgtgccggcgctgttggaagccttgaccgccgatgtgcacgccgctttccgggcggcgattcaggcgcccatcgagcatgactcactcaagcactggcgcgacctgtcctgcatcgttgaacagcgcatgctcagcatctacgagcacgacgccgccgcgcgtcagctgatcctggcgcagcatgggctgactgaagtaacccaggcggatcgtcagcatgatctggagctgggcgacctgatgctcaccgtgttcaaccgtcactttgaagtgccgacgctaccgaaggatgtggatgtatttgccctggcgctggagctgagcgaccgcgtgtatgcgcgctcggtgcatcagcatgggctgatcacgccgcgtatggcgcaggaggggatgcgggtgtttgatgcctatgtggggctgtacctgccgccctacctgcccaagcgttaattttgtgggggccgggccggcctcatcgggggcaagccccctcccacattttgaatgtattcacaaatcaaagtgtgggagggggcttgcccccgatggcggtctcaagcgccatcacaacttggcgatcgacacctcggtggacttcacgaaggcaatcacttcgctgccaatcaccagttccagctccttgaccgagcgggtggtgatcacggaggtgacaataccggacgcggtctgcacgtcgatttccgacagcacgtcgccttcgacgatttccttgatggtgcctttgaattggttacgcacgttgatggctttaatagtcatggtgttcttccttcaggggacgagtgagttattgagcccaacgcaattgcgtaggcagcggtgaaacaggttcgggttccggtggcgagcccggcagggacaacacacggttgagcacttcagcctccaacgcggccaggcgatgcgagccccgggcacgcgggcgtggcaggtcgacgatcaggtcaagaccgatctcgccgtcttcgatcaggatcacccgatcggcaatcgccacggcttcactgacgtcatgggtcaccagcaacacggtgaagccgtgcttctgccagaggttttcgatcagttgctgcatctcgatgcgggtcagggcatccagcgcgcccaacggttcgtccagcaacagcaggcgcggttggtggatcaacgcgcgggccagggccacgcgttgcttttgcccaccggacagcgccgccggccactcgttggcacgttcggcgaggccaaccgcttccagggcctccaacgctttgggccgccagtcacccttgaggcccaggcccacgttgtcgatgatctttttccacggcagcaggcgcgcttcctggaacatcaaccgcgtgtcttcaatcgcttcgctcagtggtgcggagccggccagcagctcgccgccgctggctttgtccagcccggccagcaggcgcaacaaggtacttttaccgcagccactgcgaccgaccaccgccacgaattggccggctggaatgtgcaggtcgatgtccttgagcacttcgcgcgcgccaaaggccttgcgcaacttgcgtactgccagggggatacccttgagcaggcgcggaggttgttgagctgtcatgccgcacctcctttattcacttgatacgccgggtgccagcgcagccacacacgctccaggccacgagcggccaggtcggcgagtttgccgaggatggcgtacatgacgatggccaataccaccacgtcggtttgcaggaattcccgggcgttcatcgccaggtagccgatgcccgagctggccgagatggtttccgccacgatcagcgtcagccacatgaagcccagggcaaagcgcacgcccaccaggatcgacggcagcgcgcccggcaggatcacctggcgaaacaggctgaacccggacaagccgtagctgcgcgacatctccaccaacgccgggtcgacgttgcggatgccgtggtaggtattcaggtagatcgggaacagcgtgccgagggcgaccaggaaaatcttcgccgtctcatcaatgccgaaccacaggatcaccagcggaatcagcgccaggtgcggcacgttacggatcatctgcaccgaactgtccagcaggcgttcgccccacttcgacagaccagtgataaagcccaggaccaggccgatgctgccgccgatcacaaaccccaggccggcacgccagccactgatcgccaggtgcgtccagatttcaccgctggcaaccagatgcacaccggccgcaatcacggcactaggcgccggcaggatacgggtcgacaaccagcccgccgacaccgacaactgccacaccgcgagcaatagcaccggcagaatccagggcgccacacggtggcttagtttttcatagctcatggtgcggcctcagctctgcgacgcagctttgggaaggatgtcgttggccaccatctcgccgaacgggctgacgtagccggcgcttttcggcagctcgggacgttcgatatccaggtgcggaaacagcaactcggcgacgcgatacgactcttccaggtgtggataaccggagaagatgaatgtatcgatacccagcgccgcgtattccttgacgcgctccgccacggtcgggccatcgccgaccagcgcggtgcccgcaccaccacgcaccaggccgacaccggcccacaggttggggctgacttcgaggttgtcgcggttgccaccgtgcaacgccgccatgcgttgctggccgacggaatcaaagcgtgccagggaggcctgggcacgggcgatggtctcgtcgtccaggtgggagatcagtttgtcggcggccttccatgcttcttcgttggtttcacgcacgatcacatgcaggcggataccaaagcgcacggtacgcccgagcttggcggccttggcccgtacctgttcgattttttccgcgacagcggccggtggctcgccccaagtcagcaccatttccacctgctcggctgccaggtcctgggccgcttcggaggaaccgccgaagtacagtggcggacgcggttgctggattggcggataaagcagcttggcgcctttgacgctgatgtgcgcgccgtcgtaatccacggtctcgccctccagcacacgccgccagatgcgggtgaattccaccgaggcttgataacgctcttcatggctgagaaacaagccatcgccggccaactcttccggatcaccgccggtgaccaggttgaacaacgcacgcccgccagacaggcggtccagggtcgcggcctgacgcgcggccaccgtcggggaaatgatcccggggcgcagcgcgacaaggaatttcaaacgctgggtcaccgggatcagcgaagcggccaccagccacgagtcttcgcaggagcgcccggtcgggatcagcaccccgccgaagcccaggcggtcggcggcctgggccacttgctgcaaataaccgtggtcaacggcgcgagcgccttcggcggtgccaaggtagtggccgtcgccgtgggtaggcaggaaccagaaaatattgaggctcatggagttgtctcctgaagaagtcggattacggcgctttggcaacggcggcgggtggcgtccagatcacgtccttgatgctcaagggtttggggatcaatttgagttggtagaagctgtcggcgattttctgttgggcggcgaccacttccggggtcaggaacaatgcgccatagccttggcgcttcaccgaggtcagggtgatgtcagccggcagaccgagcagcggtgcgacttgttcggtgacttcctggggattggccttggaccattcgcccacggcgcgcacttcttccaccagcgccttgatcacttctggatgttgttcggcgtagggcttggtcgccaggtagaactgatggttgtcggcgataccggtaccatcacgcagggtgcgggcttgcagctgtttctcggcggcggcctggtacgggtcccagatcacccaggcgtccacgctgccacgctcgaaagcggcacgggcatcggcgggcggcaggaacacggtctgcacgtcggtgtatttcaggccggcgtcttccagggcacgtaccaacaggtagtgcacgttggagcctttgttgagcacgatttttttgcccttgagctcggccacggatttgatcggtgagtctttcggcaccaggatcgcttcactggtcggcgccggtggttcgtaggctacgtagagcaggtcggcgccggcggcctgggcgaacaccggcggggtttcgccggtcacgccgaagtcgatggagccgacattcaggccttcaagcaactgggggccgccagggaactcggtccattgcacgttgacgccttgggccgccaggcgtttttccagggtgcccttggccttgagcagcaccagcgtgccgtatttctgatagccgatccgcagggtctcggccgcttgagcttgaacaatggcgccgaaggacacagccgcagcaaacagtgcgaccagaccacgacgcaagatgacagtgcgcatggcgctctctccaaaaatgcgattaggggttttggctgcacctgcttggccgttggcggctgagtaaggtgagtgtttcttttatatcggtgaggctcagatgctccagcgagcactcaacagacgttcattcaacacgtgggggtccagcggtttcgggcgacgggccatggcgccgtaaagtgtttccagggcttcgtgcaaacgctgttcaagtaccggcaccaattgcgcctgggcactgccttcgccgtacgcgatctggctgtcttcggcaaagatgccgtggagcaactcctgggctttcaacgccgacagcaccggcttcaatgcgtagtccaccgccagcatgtgggcgatgctgccgccggtggccatcggcaacacgatcttgtgggccagggcgcgttcaggcagcaggtccagcacggtcttcagcgcgccggagaacgaggccttgtacaccggcgtggcgatcaccaggccatcggcgttggcgacttgctgcagcaggtcgatgaccttggggctgtcgaagcgcgcatgcagcaggtcctcagccgggaagtcccgtatctggtaactcaccacttctacgcctttgtcttgcaaccactgacgggttttatccagcaacaccccggagcgcgaacgctggctgggactgcctccaagtgttacgaccaacatgcaggaattccttgagcaggtgtcggcggttcgctgtgtggcgatggcgccaagatggaacagaccttatcagcagattcatatatctataaatcttattttttcatttgtttattctctaaatgcatatgagagttatagatctccaggcgaaaaaaaaggccgtcgaaacggcctgaaaacccctgctatgtgattcggtttacatctcaattctgtggtacatgcaccgccgccatcgcgggcaagcccggctcccacagnnnnnnnnnnnnnnctgtgggagccgggcttgcccgcgatggcgatttcagcatcaacgattgggctgcggggtgaggcgcaggtacggcttcaccgcgcgataacccttcggaaagcgtttcttgatctcttcctcgtccttgagcgacggcacgatcaccacttcatcgccgtcctgccagttggcgggcgtggcgaccttgtggttgtcggtgagctgcaacgagtcgatgacccgcaggatttcgtggaaattacgcccggtactggccgggtaggtgatggtcaggcggatcttcttgttcgggtcgatcacgaacaaggaacgcacggtgagggtgtcactggcgttggggtggatcaggtcgtacaggtcggacactttgcgatcggcgtcggccaggatcgggaagttgacgaccgtgttctgggtttcgttgatgtcttcgatccacttgtggtgcgagtccaccgggtcgaccgacagggcgatggccttgacgccacgctgggcgaattcgtccttgagcttggcggtaaaacccagttcggtggtgcacaccggagtgaaatccgccgggtgggaaaacagcacaccccagctatcgcccagccattcgtggaaacgaatcgtgccagcgctggaatcctgttcgaagtcgggggcgatatcgccaagtcttaggctcatggtgtggctcctgatgagtgcttatggagccaactgtgcatggattgcggattatttaaaaagaataaatatcgatttatctagacgataaaggaatattaaaaatctgttcattggacgtgggtgcaggcgaggagcaacatcgttttcaaggttcgagaaggccttgagacgctgcacaaagaggggttcaggaagggcctgcgggggtttggcccgacttgaaagcaagacaccctgcccggtgttgcaccgggcagggctttacaggcttacaacagcgtcacgctactagaacagtggcagcgagtagctgacgatcagacggttttcgtcctgggaacgggtgttcgccaggtcggtacgccacatagcgtttttccaggcaacgccgaggtttttcagcggaccttctggaatcacgtaggcaacggtgatgtcgcgttcccactcggattgaccggtggtttcggcacggccgttgttgttggcgatggtgtcgatgtcgctacctttgaggtaaacaacaccagcggtcaggccaggtacaccgacttttgcgaagtcataggcgtagcgagcttgccaggtacgctcgccagcgcgggcgaacttctggatctgcatgtcggtagtgatgtaagccgacgagccgtcaccctggttcaaccaagggaagtcgctgctgccattgctgacctggtaaccaccaccgaaggtgtgaccggcaacggtgtacaggaacaggccgctgtacaggttgttgtcgaccttgcctttaccggcgttgaagttgttgtagttaccgctggagtagtaagcggcggtgtcgccgttcttgccatcgtccgagctgttgaaataacgcaggtcagacttcagaacgcccgggccgattgcccagttgtgggtcagacccaggaagtgctgcttgtagaagtcttccagattgccgtagtagtactgggcagtcaggtctttggtcagcttgtagtcaccaccggcgtagtagaacttgttgctgaacttgccggcgttgtagttggagctaccgttggcgccgccaatcgacaggttttcgttgttgctggagttacggcccttggccttttccacctgaccggccaccaaggtcaaatccttgatgtcgttggtggtgatctggccaccttggaaggtttgcggcagcagacgaccatcgttggtcacgataaccggcagttttggctgcagggtacccagcttcagttcggtctgggagatcttcaccttaccggtcacgcccaggctggcgtaatcgtggacggctttgttgccgtcgcttgggaagatggtgccgccggaagcggtgccggtgtagttaccgtgatcagcacggctcgaatccagacgcacgccgtacaggccgatcgcgtcaacaccgaactgaacggtaccttgggtgtaacccgagatgaaacgcagatcgaagccttggccccattcagcgtttttgctacgtgtgttggacgtggcgttagggtggccgtcacggttatcagtgttgatgtagaagttacgcagccccagtgttgccttactgtcttcgatgaaaccggcggagtttgcctgctgggcaatcgcagccaaagctacggccaacgccaatgttgacttcttcatgtaccgctcctctcatttctaatttttgtatttctttggtctcgggtctgacgccctcgatccacagatgcccgattagcgccagatagtgactaccaagtcaatcgtaaccttgtgtgtctactaccttcgtctaatcgcagttgatttggtccctgcagggtaatgagtttttcatacacccaaaaagaattgtttcattctttttcatacgattcgggaataagccttttcatgacgcggacccgtcagggtagacgacccactccataagctaatgcctaaaaggtatttgttagcgcttttttagatcgtttagtgtggccgtactgttgcatacgtcacccacgatcaaaaaggcgacgccatcatggccaaacgcacatcctcccgtcaatttgttacagtttttgtgtcactaatactttcttttggtgtcaaagccgccgatttgaccatcggcgagaaaattgcctagtgccgtttcaacagtgggccggaagtcgtaaccgccatcgcctcgggcgacttgcgaatcggcaacctcggttccagccctcttgccgcagtggcatagcggaatctatccatcgtcgcgttcatcgtatcggcccagatcaatacttctgaagcatgggtggtgcgtaatgacagccacattgacgcacccagggatttgatcggtaaaaccatcgccacgccgtttgtcattagtggatacggaaccggtgcacaaaatcgcgaaaatgacaggcgccaacgccgcagacactcctgagctgctggcaggcacgacattcccggatgcccaggcacaacaagccgatgcgctgctaaaaggcggcacggcaaagtttttgaaggaaaagggaaaggtggaggtggtgctgccggattacttggccttggtgactgacaaatttatcagtccgagaactgatccatgtgggagcgggcttgctcccacattttttgacctgagtcgttcccgaaatcgaggttacagggccttctcgaaaatcttcgaattacgctgatagttgtacagggacgcccgcgcagacggcagacggtcaacactgctcggctcaaacccccgctcacggaaccagtgggcggtgcgggtggtgaggacaaacaaggtcttcaacccctgcgcccgggcacgggcctggatgcgctccagcaacacatcaccacgtgcgccatgacggtactccgggttcactgccaggcaagccaactcacccgcgtccgaatcggcaatctgatacagcgccgcacaggcgatgatcatgccttcgcgctccaccacgctgaactgctcgatctcacgctccagcacttcccgcgaacggcgtaccaggatgccctgctcttccagcgggctgatcaggtcaagcaaaccgccgacatcctcaatcgccgcttcgcgcacctgctcgaattgctcctgggccaccagcgtaccgccgccgtcccgggtaaacagctcggtgagcaaggcgccgtcttcggcatagctgacaatatggctgcgccctactccaccccggcacgcttcggcggcggcatcgagcaattcggcctgatagttggttttgcccaggcgttgcaggtgagccggcacctgttgcgggcgcaactcgcgtaccaggcgaccattttcatcgatcaagcccatatcggcgccaaacaacagcagcttgtcggcgcccaggtcgatggcggcgcgggtggcgacgtcttcgcaggccaggttgaagatctccccggtcggcgagtagcccaacggcgacagcagcacgatggagcgttcgtccaacaggcggttgatgcccttgcggtctacgcggcgtacttcgccggtgtggtggtagtccacgccatccaatacaccgatgggacgtgcggtcacgaaattaccgctggttacacgcaggcgcgagccctgcatcggcgacgaggccatgtccatcgataggcgagcttcaatggcgatgcgcaggtggccgaccgcgtcgatcacgcactccagcgtcgccgcgtcagtgatgcgcatgccttcgtggtaagtcgggatcaggccacgcgcttcaaggcgcacttcgatctgtggccgcgaaccgtggaccagtaccaagcgcacgcccaggctgtgcagcagcaccaggtcgtggacgatattgccgaagttgggatgctccacaccgtcgccgggcagcatgaccacaaaggtacagtcgcggtgggcattgatgtagggggacgcgtgacgaagccagttaacgtagtcgggcatagaacctgggcctgtaataaaaagcagccgaaaaaggatgaatcatgaaagcgcacggcgggctgatggttatcgtcggaacaggcttggcgacacgctcactctccttctatgtacgaacaggcaggggttaatttatgcaggtttcaggcagtaatgttcgatcagttcccgcaatagacgcactgtaggcgtcaagcgtgacatttcgaggtattcgcccggctggtgcgcgcaggcgatgtcgccggggccgagcaccagggtttcacaaccaaggcgctgaagataaggcgcttcggtgccgaacgctactgcttcggcacgatggccggtcaatcgttccgccacccgcaccagttcggcgtcttccggttgctcgaagggcggtacctcggggaacagcggcgcgtagtcaatcttgacctgatggcgctcggccaacggctggagcttctggcggatcgcatcacgcagcacctgagggtccatgcccggcagtgggcgcaggtcgaactccagggaacactggccgcagatgcggttggggttgtcgccgccgtggatacagccgaagttcatggtcggctgcggcacgctgaattgcgggttgcggtactcgcgctgccaggctaggcgcaggccgcgcagttcgccgatggcgtcgtgcatggcttcaagcgcgctgtggcccaggctcgggtccgacgaatggccgctttggccaagaatatcgatgcgctccatcatcacgcctttatgcaggcggatcggtttgaggccagtcggctcgccgatcaccgctgcgcggcccaatggacggcccgcctcggccagtgcacgggcgccggacatggagctttcctcgtcgcacgtggcgagaatcagcagcggctgtttgaatggctgatccagcagcggcaacactgcttcaatggccagcgcgaaaaagcccttcatgtcgcagctgcccaagcctacccaacggccgtcgacttccgtcagcttgagcgggtcggtcttccacagcgctgcgtcataagggacggtatcactatgacccgccagcaccaggccaccgggcccactgccgtaactggccaacaggttgaacttgccggggctgacctgttggatatcgatggcgaaacccagatcccccagccaagcggcgagcaagtcgatcaccgggcggttggtctggtcgagagacgcctgggtgcagctcacggatggcgcagcaatcagcgcggcaaactgctctttcatggacggtaacggcatgctcggcctctcgacttcccggatgaacctcactatagagccatctgcacgacacaataaaccgttgcggcacgttgccgggctcagtcctgtacactgcacgaccttggcagccactcttttacccggctgcgctcccgatcctggatgttccggccatgcaaaaagaaactgaaatcaagctccgcgtcagccgcgagaccctcgccgcgctgcgtgagcacccgctcctgaaaaaacgcaacaaaagtggctgggaacgccgtgagttgatgaaccagtacttcgacactcccgagcgcgacctggcccaggccaaagtcgccctgcgcctgcgcaaggacggtgacgacatcattcagaccctcaagacccgtggccagagcgtcgccggcttgtcggaacgtaacgaatacaactgggaactgcccaaagccaagctcgacgtaaagaaactcgacggcgaatgctggcccgagcaactggccgagctggacaaaaagaccctcaagccgatcttcaccaccgacttcgtgcgtgagcgcgccgaaatcgcctgggggcgcggcaaggccaaggtggtgatcgaagccgccctggacctgggccacgtggtggtcggcaagcagaaagaagaaatctgcgagctggaactggaactgcgcgaaggcgaaccgtctgccctgctggaactggccgccgaactggccgcgaccctggcgttgatgccgtgcgatatcagcaaggccgagcgcggctaccgcctgtacgacgccagcagctactccctgagccttccggcgccacagttgcacgccgaaatgccgctggatgacgccttcgccgcaatcatgtggcacctgctgggcagcagccaacgcctggccgagcaataccgtttcaatggccactggcgcctgctgcaagactgggtcgacaacctcggcgaactgcgtgccctggtcggcagcctcggccaggcggcaccgcgtcagtccaccagcgagctgcgcagcgcactcgatgccctgctggaagactggcgtccactggtacaggccggtgatgacgacgaagacatccgcaaagccgcgccggagcagttcgccgaagaactggacgacgtgcgctggggcctgttctcgctgaacgcttcacgctggctgctggcccgcacctggaccgcggaccgcaacgtgcgtggcaaccgccaaggcgccgcgcaaatcaccaactggctgccgcgcctgctggccgacgatgccgtcgccctgcaactgccgcgctaccagcaacagccggaagacctggccgagcaattgccacgcatcgagcgtatccaggcctggctgcaccatgcgcgtcaggtggtcgacattcccgaactggaccgtctgtacggcgagctgaacaagttggtgcaactggccaaccagccgatcaccgatgagtcgctggatgcgcggatgcatcaggcgattgcggtgtatcagaaccgggcgtggaagaccttgttgcgcctgtaaggccgctttcgcgggcaagcccgctcccacactgactgggttcacacatagaaatctgtgaacccaatccaatgtgggagccgggcttgcccgcgatgaggccatccctgtcagcgcaatactggcaggctggtggtggatttgatctcggacaaagccacaatcgaattgacctcctgaatccccggcaccatcgacagcttctcgaagaaaaaccgctcatacgcctcgatgtccgaggtgacgatgcgcagtagaaaatccaccgcccccatcagcacataacactccagcacttccggaaacccgcgaatcgcgtcggtgaactcggtgaagttggaacgaccgtgggcgttgagtttcacttcggcgaatatctgcgtgttgaggccgatcttcttgcgatccagcaaggtcacctggccgcgaatcacgccctcttccttgagccgttggatgcgtcgccagcaaggcgactgggaaaggcccacctgttcggcgatctgcgcgctggagagagaagcgtcttcttgcaacagggccaggatacggcggtcataggcgtccaactcgctgtgcatataaataccctccatcgcacttattctgaattgattgattcgattttttacaaaacaggcccatcttagataagaaatctccggtggcgaatgtaaaaatttctccagtcgaatctggagctttcccatgcacgccgtcgaaaccaaccaccccgctacccgcgtcgatgcgtgggccgtcaacaacgcccattgccaggcgcattaccagatcgtcgccgaggcggagcccgacgtggtgtgccgggtacttaactacttcgccctgcaatgcctcacgccgcaacaggtcacggtcaaccgcgaagaagacctgttgaacatcggcatcgtcatggacggcctgagctggcaccgcgcccaggtgatcggtgaaaagattcgaaacctgatcagcgtgtgcgcgctggacgtgtggtcggctgatgccgcggggcctctggcagtggtggcggtcgctcagtaagaacctgcaatacacgccgggaggaagatatccaggggctggctagcctgggatttacgcccactgccctcaggaaaaccttcatgccggttgatcaacgcttggaactgcatcaactgctgccggctttgcttgaagggcgactgatcaccccagaagttgcacagcagttgtcggcgctgccggccagcaacaccttgcatcccctggaacgcatcgcagcccttggccccagcctggaaaccctgtccgaatggctggcccagcatgccgggcaaccgtacctgcgtatcgacccgttgaagatcgatgtggcgacggtcgtgccgctcatgtcccacgcgttcgcccaacgccactcgatccttgcggtggcggtggacgcgcagacggtcaccgtcgccagcgcccagccacacgtcaccagttgggaagccgggctggcgcaggtgctcaagcgctcgatcaagcgtgtggtcgccaacccccaggacataacgcgctgtatcggcgagttctaccggctggcgaagtccgtcagcggcgccgatcaaaaagttgcggcaccgggcaacaacgaactgctcaacctcggcgccagcgaccaggagccggatgccaacgacgcacatatcgtcaacatcgtcgactggctgttgcaatacgctttcggccagcgcgccagcgatatccacattgagccgtgccgagaacagggccgtgtgcgctttcgtatcgacgggttgttgcacgacgtctatcagttcccgccccaggtcacgatggcagtggtcagccgcctcaaaagcctgggccgcatgaatgtggcggaaaagcgcaggccccaggacggtcgggtcaagaccaaaagcccgaccggagcggaagtggagctgcgcctgtccaccttgcccacggcgtttggcgaaaagctggtgatgcggatcttcgacccacaagtactgctcaagggctttgaccagcttggtttatcggttgaggaccagcaacgctggcaagccatgacgagccagaccaacggcatcatcctggttaccggccctaccggttcaggcaagaccagcaccctctacaccacgctcaagcaattggccacgcgggaggtcaacctgtgcaccgtggaagatccgatcgagatggtcgagccggcgttcaaccagatgcaggtgcagcacaatatcgacctgaccttcgccagcggcatccgcgccctgctccgccaggacccggacatcatcatgatcggcgagatccgcgaccaggagaccgccgaaatggcgatccaggccgcattgaccgggcacatggtgctgtcgaccctgcataccaacgatgcgcccagcgccatcagccgcttgcaggaactgggcattgcgcattatttgatcaaggccaccttgctcggcgtaatggcgcagcgtttggtgcgggtcttatgcccgcactgcaagcggtctctgggtgacgcccatgaagcggtcgggtgcgttgaatgtcgacacagcggttatcaggggcgggccggcgtttacgaaatcatggttttgaacgaagcgctcaacacattgatcacgcctggggccgatgtgcaggccctgcgccaggccgcagttacccacggcatgtgcagcttgcgcatggccggcatgcagaaggtcgcggcgggggtcaccacgatggcggaagtcttgcgggtgactcccggggattcggtaacaaatcctttgtttgtcaggcagtgaaaccgttcttatcggtgacaacaccgttacaatcggcccaacgtcgtttcactgacaccatcagatagggaatcgctatgcagatcggaaccgtactgcttcttttcgtgggtttggccatcgccatcctgttcatgggcttcaaggtggtcccccagggctaccaatggacggtcgagcgttttggccgttacaccaacaccctcaagcctggcttgaacatcatcatcccggtcatggaccgcatcggtcgcaagatcaacgtgatggaaagcgtactggatatcccgccccaggaagtcatcaccgccgacaacgccaccgtgcagatcgacgccgtgtgcttcttccaggtggtaaacaccgcccaggccgcctacgaggtcaacaacctcgaacacgccatccgcaacctgctgcaaaccaacatccgtaccgtgctcggctccatggaactggatgccatgctcagccagcgtgacggcatcaacgaaaaactgctgaagaccgtggacgaagccaccgcgccgtgggggatcaagatcacccgtatcgagatcaaggacatcagcccgcctgccgacctgatggccgccatgtcgggccagatgaaagccgaacggatcaagcgtgcgcagatcctcgaagccgaaggcctgcgcgcctcggcgatcctgactgccgaaggcaagaagcaggcacagattctcgaggccgaaggtagccggcaggcggcgttccttgaatccgaagcccgtgagcgtcaggccgaagccgaagcacgcgccacacaggtggtgtcggaagcgatcgcatcaggcaacgtgcaggcggtcaattacttcgtcgcacagaaatacatcgacgccctgggcaagctggcctcggccaacaacagcaaggtcatcctgatgccgctggaggccagccaggtgatcggcgcagttggcggtatcggcgagatcgtcaaggcaacgttcgacaacaagaaaggctgaggccagcgccatgtgggatttcctgcagcatctgtcgttctgggattggttggcactgggcacagtactgctgattcttgaggtattcggcgctggcggttacctgttgtggatgggtatcgccgcagccgccgtgggcgtgatcaagtttctggtgccacccctggggctggaatggcaacttctgctgtttgccgtgttgtcgataatgacggcggtgtactggtggaagcgtcagcgcagcagcgccaaggccagcgaccagccgggtctcaacgagcgcggttccgagctgatcggccgcaccttcgtggtgcaccaggcgattgtggatggccggggcaaggtaaaagtcggtgatggcgtatggatggtgaccggcccggacagccccgtaggcgctcaagtgcgggtggttggccaggaaggcgtggtgttaagggttgaaactgtttagtcagtgatggaactcggttgggctaactacaatcataaagtacagataacccacccggagtcacccatcatgcgtctcaaatatgctgtcgcaacccttgctgtgctttccctccctgtcggatcagccatggccgacagtttctggcgcaatgtcatctcgtcgggcgccaccaccggctcgacgtacctgacgttcaaggaccacaagctggtggtcgccgcccaagacgacgccggcagcttcgttgccagcgatggcggcatccgtggcccatacctggaagccgcgatgcagaaagtccgcgccgacaaccctggcctgcaggccacggacatggagctggccaacgctatcctcgcgaaaaatgcagtcaccgaataactcgggctcaataaaaatgccgctgttaacagcggcatttttttgtcctcaattcctacggtcatcatcgctgggcactacacgagcattgctgttttcccaactgcatacagagaagtcctgtcgagcctcactctgccgggccacaagctaaggattcctttttgaacaaagcgaatcactgcccatgcacaagattgcctacgcactgctgttctctgcatttgccaccgcctacgcccaggcagaaagctggtacggatcagccaaattcaacagcgctcgccagaacctctccagttcactgctcaccagcccgcgcgtgacggacagggtggacgccccggatagcagcaaagcattcgtggcctctttcgccgcaggctatgccttcgccaatggctggcgcctggaaggggagtacacgatgccaaacagttcgaccttcaaatcctactgggcccccttcaatgccaacgtcaacagcctgcatgtgcagagccagcgcttgatgctcaacggctataaagatatcccgatcaaccagtggctatcgttttacggtatggccggtgtgggcatcgcacgcattgagtccgaaggttatcaaaccattgagacccgtcgttttgccagcaaccgccaacataaccttgcctatagcctgggtattgggctggaggccaaggccagtgagcgactcacgttaggggcgggttatcgttacaccgccatgggcgacgtcgaaaccggttacaacaccttcacgaaccgcgcaaatgcacgggatgagcaactcaaaggcaaactcaaggagcagaacatgttcctggaagcgcggcttgccttctgattatttgcgaagaatgccgccttcgacgtggcattcttcggctcaatagtgacgattcattcacagatgacaggctatattcagtcaagccgtgcaaccatgccggtactgatacctcgcttactcatcgccaacctgaaacggatgccttcgtcgtcatgagccaactgcccttcctgccgttttccaaacccaccatcgatgaagccaccattgcagcggtcggcgatgtactgcgctcgggctggatcaccagcgggccgaaggtgcaggccttcgaagctcagttgtcggagtactttggcggtcggccggtgcgcaccttcaactcgggcacctgcaccatggagattgccttgcgcattgccggcatcgggccaggcgatgaagtcatcaccacgccgatttcctgggtagccacggccaacgtgattctggaagtgggcgctacgccggtgtttgccgatattgacccggtgacccgcaatatcgacctgtcccaggtggaagcggcgattaccccgcgcaccaaggcgatcatcccggtttacctggccggcctgcccctggatatgccgatgctgtatgcactggcgaacaagtacaacctgcgcattatcgaagatgcggcgcaggcgctgggttccagctgggatggcgagcgtattggcgccaccggggattttgtgtcgttcagtttccaggccaacaagaacatcacctcttccgagggcggctgcctggtgttgaacaacgccgaagaagcgcgactggcagaaaaataccgcctgcaaggtgttacccgtaccggcttcgacggcctggacgtggatgtattaggcggcaagttcaacatgaccgacatcgccgccgccattggcctggggcaatttgcccatatcgagcagatcactgctcaccgccagaacctggcgcggcactacttcaaatgctttggcagtgactttgaagagcagtacggcgcacaactgccgccggcagacttcgaaaacagcaactggcacctgtttcaactggtgctgccggaacgtcaggacggcctgccagcccgcgccaccttcatggagcaaatgcaggcccatggcgtcggcattggctatcactacccgccgatccacctgctgagcctttatcgggcacaggggttcaaggaaggcatgttcccggtggcggagaaagtggggcgcttgatcgtgtcgttgccgatgtttacggcgatgacagaggcggatgtggagcggtcggtggcagccgtgaaggcagttctacagccctaaaagcacattgcgggagccgtataaccggctcccgcaacaggatcactcgccgatggcggctttgtagccggcagcatccagcaatttgtccaggtcagccgggttgcttggcttgagcttgaagatccaagcgccgtagggatcagagttcagcagctccgggctgccactcagttcttcgttgacggcaatcacttcgcctgcaaccggggcgtagatatccgaggcggccttgaccgactcaaccacacccgcctggccagcagcgtcaaactgggcgcccacttcggccaactcaacaaacaccacatcacccaacgcttcctgagcatggtcggaaataccgacggtcacggtgccgtcagcttccaggcgtgcccattcgtggctttcggcaaaacgcaggtcggcagggatatcgctcataatctgtgtcctcaagaagtaatgtcagcggccattggcctgccggaaataggttagatcaaggttttgccatggcgcacgaaggtcggtttgaccactcgaaccgggtaccacttgccgcggatttccacttcggcccgatcagcggttgccgtcggtacacgcgccagggcaatggatttgctcagcgtaggagagaaactaccactggtgatctccccttcgccaatattggcgatacgaaccacctggtgagcgcgcaaaaccccgcgttcttccagcaccagcccgaccagcttgaactgcaccccggctgctttttctgcttccagcgcggcgcggccaatgaaattacgctcggcaggctcccaggcgatgctccaggccatgttcgatgccaggggcgaaacctcctggtggatgtcctggccgtacaggttcatccccgcttccaggcgcagggtatcgcgggcgccgaggccgatgggtgaaataccagcgcccaccaggtcattgaaaaagcccggagcctgatcagcgggcaaaacaatctccaggccatcttcgccggtgtaacccgtgcgtgcgataaaccagtcaccatcggcgtggccttcgaagggcttgagctggtgaatcagggtgctgcgcgattgcgtgaccagttcggcgatcttttgccgggcgtggggaccttggatggccagcatggccaactcggggcgctcatgcagttgcacctgatagtcgcccagttgcgcttgcatccaggccatatcctggtcgcgggtggcagcgttgaccaccagccgataagcggcctcggtgcggtagacaatcatgtcgtccaccacgccgccctgttcgttgagcatggcgctgtacaacgcacggccgcagccgtgcaggcgttcgacatcattggccagcaggtgctggagccattccttggcctgggggccgctgacatcgatcacggtcatatgagatacatcgaacaccccgcagtcgcgtcgcacctgatggtgctcttcaacttgcgagccgtagtgcaaaggcatatcccaaccgccaaaatcgaccattttcgcgccaagggcgagatgcaggtcatacagaggcgtacgctgtcccatgggtttctccttccgggcttggcgaaggtgcgcggagctactgtccgcactgaacaccttgatttacaaggcctgcagccacgtccagcgacccgctccgaaagacgaagcgcaccgaatgccgcgcattgtagccgcaagccgtaggactggcacctaaccgatttgccgggcggagcgtcggatcagcccgatcaccggcaacaggcccaccagcaccagggtcaacgccggcaaagaggcccgtgcccactcgccctcactggtcatttcaaagatccgcactgccagcgtatcccagccaaacgggcgcatcagcaaggtggcgggcatttccttgagcacatcgacaaacaccaggagtgctgcgctcaaagtacccggcagcagcaacggcagatacactttgcaaaacagtcgtgggccactcacacctagactgcgtgcagcttccggcagggacgggcggatacgcgccaggctgttttccaacggcccataggccaccgccaggaaacgcaccaggtacgccagcaccaatgccgacaggctgcccaacagcaacggcttgcccgccccaccgagccagctggagacaggcaccaccagttcacggtccagatagctgaacgccaacatgatcgataccgccagcaccgagcccggcaaggcatagccgacgttggccaggctgataccggaacggatcgcccgtgtcggcgccaggcggttggcgaacgccagcaccagcgccacgctgaccgtgatcaaggccgcgatgccgcccaggtaaagcgtgtggaggatcaggcccgaatagcgctcatccagatcgaagcggccgcgctgccagaaccaggccaccagttgcaacatcgggatgacaaacgcgcaggcgaacaccaacccgcaccaactgctggccgcggccgccttgaacccgcgcaggtggtacaacgccttactacgtggccgttcattgctcggtcggctggcgccccgggcgcgccgctcgccgtacagcaccagcatcaccaccagcagcaacaggctggccaactgggcggcgctggaaaggctgaagaagccgtaccacgtcttgtagatggcggtggtgaacgtgtcgaagttgaacactgagaccgcgccgaaatccgccagggtttccatcaacgctaaggcgactccagccccaatcgccggccgcgccatgggcagggccacgtgccagaacgctcgccatggcgattgccccagcacccgcgcggcctccatcaggcctttgccctgggccaggaacgcggtgcgcgccaatagataaacatagggatagaacaccaggaccaggacgatgatcacaccgctggtggagcgcacccgtggcaggcgcagcccggtgccgaaccattcacgcaacagggtttgcacgggaccggagaagtccagcaggccgacaaacacaaaggccagcacataggcaggaatggcgaacggcaacatcaacgcccaatccagccagcgccgaccaggaaactcgcagaggctggtcaaccaggccaggctgacgcccaacagggtcacgccgataccgacgcccagcaccagggtgagcgtgttgcccagcaggcgcggcatctgggtttcccacaggtgcgaccagatctggttgtcgatactttgccaggacagcaacagcacgctcagcggcagcagtacgagggcggcgacggtgaagaccggcaggtaccagcggcgttgggcggggtgggccaaagtcagttctcagtgaatgtctttaattcaactcaatccaatgtgggagggggcttgcccccgatggcggtggatcagtccatgatgagtgaactgatatcccgctatcgggggcaagccccctcccacattttgaccagcagtgtgtcagttccagccggcgcgatccatcaggcggatcgcctcagcctggcgcttgcccgccacttccaccggcaaggtgtccgccacgaacttgccccaggtcgccacttcggctgacggcggcactgccgggttggccgggaactcctggttcacatcggcaaagatcttctgcgcctcaggcgtggtcatccactctaccagcgccttggcggcttccggatgcggcgcgtgctgggtcaggccgatacccgacaggttcacgtgcacgccacggtcgccctggttcggccagaacagcttcaccgccaggtccggtttctgcttgtgcaggcggccgtagtagtaggtgttgacgatacccacgtcgcattgcccggcgttgatggcttcgagcacagcgatgtcatcggagaacacgtcggtggacaggttgttgacccaacccttgacgatctcttcggtcttggccgcgccgtgggtttcgatcagggtggcggtcagcgactggttgtagacctttttcgccgtacgcaggcacaggcggccttcccactgtttgtcagccagggcttcgtaggtggtgaggtcacccggtttcacccggtcggtggaataggcgatggtccgtgcgcgcaggctcaagccggtccaggtgtgttttgacgagcgatattgcaggggaatgttcttgtcgatcaccggggaggtgaacggttgcaggatccccatctgctcggcctgccagaggttgccggcatccacggtgagcagaaggtcggcggtggcgtttgcgccctcggccttgatgcgctgcatcagcggcgcttccttgtcggtgatgaacttgacctgcacgccggttttctgggtgtaggcatcgaagaccggcttgatcagctcatcgatgcgcgaggagtagaccaccacttcgtcggcggcctgcacagtggtgctgccgatcagggtgagtgccagggcagtcaggaggcgcttgggtgccaacatgggtgcggtctctcatttgcaaaaagagggcaaatgataaggactcacatttggtagtgcttggtagaggcgttaccagatgttgcatgacggagattggttgtgggctgatggcctcatcgggggcaagccccctcccacaagggatcgcatttcaatatcagggtttcgcaaggtccgggagatcgccagtcaggccgagagcctgacgcacaaacacggccttggcctcgggcatctggtcgaccatcttcaacccggcgttacgcaaccagcgcaacggcagttggtcggcctggaacagtcgctcaaaaccttccatcgccgccatcagcgccaggttatgcggcatgcgccgacgctcgtaacggctcagtaccttaacgtccgccaggcgctcgccgcgctcggttgccgccaacagcacctcggccaacaccgctgcatcgaggaatcccaggttcacaccctgccccgccaacggatgaatgacgtgagccgcgtcgccgatcaaggccaggccttcggccacgtagcgcttggcgtggcgctgacgcaacggcacacatacgcgtgggtcggcgctgatcacgttgccgagtcgtccctcaaaggcgcgctccagctcgcgacagaagctttcatcatccagcgccatcaagcgctcggactcggccggcgtggtcgaccagacgatcgaacaccaatcctcctgcccatcccgctccagcggcaaaaacgccagcggacccatatcggtaaagcgttgccacgccgtacgctgatgcggctggctgctgcgcacgctggtgacgatggcgttatgcaggtaatcccactcacgggtcgcggtgcctgtcaggcggcgtacggcggagttggcaccatcggcggccaccaccagcggcgcgcgcaacgtgcggccatcggccagggtcagcagccagtcatcgccggaacggcgcatctgctccaggcgcgcattggccagcaggcccaggtcgcagtcgtgcagacggtcaagcaaggcatcctgcaccacgcggttctcgacgatatgcccgagcacctcggcatgcacgctggcggccgaaaagtggatctgcccggtgccgctgccgtcccacacctgcatctcgccgtaagggctggcgcggcgcgagacgatgccgtcccacacgcccagccgctccagaatgcgctggctggcggccgacaaggcgctcacacggggttcgaaggcggcctcgcggtcgaacggcttgacgctcagcgggctgccgtcgagcagcagcacctgcaggccgctgccctgcaacgccagcgccagggcgcttccgaccattccggccccgacaatcagcacatctgcgcgcatgtccatgctttaagcctgtctcactggcggcttgcgccgcacgtaaagggttttgtcgacccgcgccaccagggtgccggagccgtcatgaatctgcaccttgaggtggggcaggtacttctcgccaccttcggtgtgtcgacggacctcgtccagcaaggcctcgtcgatggaaaattcggcatacaccgggcctttgccgggcgaaatgaaatcgatactcgcggccttgtcccacacgatgtagtcgcggcccaggttctccatcagcatcaacatgtagaacgggtcaaccatcgaatacaggctgccgccgaattgcgtgccgacatagttgcggttgtaccagcccaggcccatgcgcactttgacgtgacgaaaatcggcgctcatgtgctgaacgctgacccccgcgcccaggtacggcgggtacagggtcatgacccaacgcaacaatctcgccttgcccaggcgcgcgatcaaccacttacgcatcgggacgcgtgcccaggcccatggcttgccgggcgaaccagcgtttggcgggcggcaacaaatccagccccagcagccccatgtttcggcccagggcgaccaacggttgggcgctgccgaacaggcgcgtgacctggtcggagaagcccacggtgagtttctggtccaggcgctggcgctcgcgatagccctgcaaggtggccagatcacccggcacctgcggcccggccagcaaggcctcggccagggcattcgcgtcacgcagggacaggttgaaaccctgcccggcaatcgggtgcaggctgtgggcggcgttgccaaggatggccaagtgcgagcgcacttgctcctcggcttccaccagcgtcagcggatacaggtgacgggcgccaacctgcttgagggtgcccaggcgatagccgaacacaccctgcaattcactgaggaaactgcgttcatcgagattggccaggcgctgcgcatccatgccgatgcgcgtccagaccagcgcgcagcggttgtctggcagcggcagcaaggccatcgggccttcatcggtgaagcgctcgaacgcctcgccgttgtgggcttcgctcggggtgatgttggcgatcagcgcgctctggttgtaggggcgggttttcacgccgatgcccagttgttcgcgcaggccggagcggccgccgtcagccagtacagcgagatcgcactccagcacggtttcatcgttaagggtcaggcggtagccatcgggaagcggctccatgcgcacgacttcggccgggcaacgccagctgaccacgtctttgtccaggccttgccacaggcattggcccagccaggcgttttccaccacgtaaccgagggccggcacgccctcttccatggcagacaagcgcgcggtggagaaacgcccacggtcggacacatggatctgcttgatcggctcggcgcggcgggaaatgtcctgccacaggcccaggcgctggtagatctgccgggcaccgaaggacagcgccgaggaacgcgcatcgtagctcggctggtagctgtcgcccggcgcgaagggttcgatcagcacgatcttccagccccgggccttggccccggcctgcaacgccagtgccaggctggcgcccaccaggccgccgccgatgatcgccaggttgacccggctcatcgcgcagccgccatcagcgcttcgatatcggcgacagtcttgggcacgccgccggtcaggatttcacagccttgcttggtcactaccacgtcgtcctcgatgcgtacgccaatgccacgccatttctttgccacgttctggttgtccggtgaaatgtagatccccggttccacggtcaacgccatgccgacttccagcacacgccattcaccgcccactttatattcgcccacatcgtgtacatccatgcccagccaatgaccggcacggtgcatgtaaaacaccttataggcttcgctggcgatcagttcgtcgacgtcaccctgcaacaaccccagcttgaccaacccggcggtgatgacccgtacggtcgcctcatgggcctggttccaatgcttgtccggggcgatctccgcgaaggcggcttcctgggaggccagcacaatctcgtagatcgctttctgttccggcgagaacttgccactgaccggccaggtgcgggtgatgtcgctggcatagcagtcgatctcgcaaccggcgtcgatcagcaccaggtcgccgtccttgagcaccgcgtcattctgctggtaatgcaggatgcagctgttgcgcccggcggcgacgatggaaccgtaggccggcattttcgcgccgcctttgcgaaattcataatccagctcggcttccaggctgaactcgtacagcccggcccggctggcctgcatcgccttcacgtgggccgcgcaagagattcgcgctgcctcgcgcatcaccttcacttccgccgccgatttatacaggcgcatgtcgtgcaacagatgatccagggcaacgaattcgttcggtggctgggcgcccaggtgggccttggagcggatcacgttgatccactccatcaggtgccggtcgaactcggcattgctgcccatggccgagtacacccggtcgcggccttcgataaggccgggcaggatgtcgtcgatatcggtgatggggaaggcatcgtcggcgccaaagtcacggattgcgccttcggtgccggcgcgcaggccgtcccacagttcgcgttcggcgttgcgttcgcggcagaacagcacgtactcgccgtgctggcgaccgggcatcagcacgatcaccgcttccggctcggggaagccgctcaggtactggaaatcactgtcctggcggtacacgtgttcgacatcgcgattgcggatcgccacggcggcggccggcaggatcgcgatgctgttgggttccatctgcgccatgagcgccttgcggcgccgggtgtattccgctttggggatatggatcatgggcagaggagtttcctttcttagtgcagcgacggcttgggtgcagccggctcagccgattttttggtctcggtgaacagcagcagcggcgcgacgcgcaggtattccatcacttccatgtagtcaccctcgccgtcttcggactcttccagggcgtcttgcacctgggagatggctgccaggtcctgcagcacttccttggcatcggtgctcagttccaggccgccggcgttcacgccgaagccgtggaggaagccctggcaccattggcccagtgcggcggcacgctcggctagcggcgcgtcgtcggtcggcagcagcaggaccacggtgacgtcatcaccggtcagctcgcccttgaccatctcttgtaggccgatcagcgcgttgcgcacgttgtcggtcggttcggtttccagcagctcggccacgtcggccagccagttgtcggcgtcgaagccgacgccggtgcagctacggcccagcaacacgccgtgcaattcggccggcgagcaggggtggccgctggtgctcagcagtttggagaaagcatcgtacggggagttctgaataggcatggtgagctaggcgccagacggcgcaatgtctagaatggagcgctgtatcctagcaccggcagacgtaccaagactatcaagggcgtcagatcgtttatcctgcagttgccattcatcagacaaatccagtggaacccaatggaagacaccgacctgcaagcgctgatggccagactcgaattgctaattactcgggtcgagcaacttaagagtcaaaacggactcctattagctcaggaaaagacctggcgcgaggaacgcgctcacctcattgaaaaaaacgaaatcgcccggcgtaaggtcgaatcgatgatttcgcgcctgaaggccctggagcaagactcatgagttcaagcaatagcgtcaccgtgcagatcctcgacaaagaatattcgatcatctgcccccaggaagagcgcaacaacctggtgagcgccgcccgctacctggacggcaagatgcgtgaaatccgcagcagcggcaaagtcatcggcgccgaccgcatcgccgtgatggccgccctgaacattacccacgatttgctgcataagcaggaacgccctgacgtgcaggccagcggttcgacgcgtgagcaggtgcgtgacttgctggagcgtgtcgatctggtgctttccagcgatgcagacgcacccaagggctgattgccgcgactgtttaaggtatactcgccccactccctggcgtgtttgccagtcggcgatgtccctgagccgattcgcactaccctggaagttgcacgttgggctggtgtgcatgtccgctagacggaaagccttaaagcctactgcatcttccaccttgaactttcgggttcaagggctaagtcgacagcggctctgtcggggagcctgaattcccaaactcaatgccagtcttcggactggcattgttttatgagccgaaaccatgaccgaacctgcgccgctttcccgtccgcaacttcgacgcatgttgcgcaaagcccgccgcgccctcacgccgagcgagcagcgcaaggccgcccacggcctgtatcggcaactggcacagcacccgctgtttcgccgggccaaacatatttccttatacctaccgacggacggtgaaatcgatccgcgcttgctgctgcgtgcagcacagcgccggggcaaggccacctacctgccggtgcttagcgcctggccacgtaccaagatggtgttccaacgggtcaagcctggtgagaagctgctgcccaatcgctttcgcatcctggaaccacgggtgaacatcagccgccaacgcaaagtctgggcgctggacctggtgctgctgccgttggtgggttttgatgatgccggcggacgcctgggcatgggcggcgggttctacgaccgcagcctggcttacctggcgcgccgccagagctggcgcaagccgacgctgctgggcctggcccatgaatgccagaaggtcgatcgattggcgcaggcgagctgggatgtgccgttggcgggcaccgtcaccgataagcattggtatattgcgaagacgccactggagtcagcggcgccttgaagaagggtcagcgcttgaacggttgcggctgctgctgagccagttcaacgggcgcatcggtcttgttcgaccacaagctttgggcatacccggtggtcacgacgcccagaccaaacaaaatcaccaaaatccatagtaaatccggtttacgttgcatcgattgccccccttcaggcacctcgtacacgatgacaacaacgttccaaagagtccgttgcagctgcgtcaagctttaaaagccggcattctgcggtaacgtgaaccaacacgcaaaccttggcgccaaccgactgtcggtttgtcatcaaattgcaggacaacttgcccaccgcttatttcaggagcccaacaatggcctattggctgatgaaatccgagcccgacgaactctccatcaaaggcctggaaaagcttggcgaagcccgctgggacggggtacgcaactaccaggcgcgtaacttcctgcgggccatggcggtgggtgacgaatttttcttctatcactccagttgcccggagccgggcattgccggcatcggcaaaatcatcgaggcggcctatccggatcccaccgcgttggagcccgaaagccactacttcgacgccaaggccaccccggagaaaaatccgtggagcgcgatcaacgttgcccatgtgcagacctttcccaaggtgctcggcctaggctacctgaagcaacaagccgccctcgccgaactgcccctggtgcaaaaaggcagccggctgtcggtgatggccgtcacgcccgagcaatggcacgccgtgatccatttgatttgactgaccggcatcaacgccccaccggggcaaaccgctcacactaggacgctaacgccgcaggaagcagccatgtcgacgaaccaccacacctcccgccttttcgccgttgccctcatcgccctgttgctgggtgccggtggcttcggttactggcgctccacccaggaccgcctgcccgaaggcctgagcatgggcaatgggcgcctggaatccaccgaagtgcagatcgccgccaagatccccgggcgcctggccgaagtgcgggtagacgaaggcgacaaggtgctcaagggccaactgcttgcacgcatggacacccgcaccctcgaagcccaacgcgcccaggccgaagccgaagtgctgcgcgccaaggaaaacttcgccgccgccgaggccaacgtgcaactgcgccagagcgagcaactgctggccaaccaggaactcaagcgcacccaggagctgtacaagcgcggcttcgccagcagccagctgattgatcaacagcaggcgcgacagaacaccggcaacgccgccgtgattgccgcgcaggcccaggtcaattcggtaaaggccgccattggcgccgccgaggcccaggtcgcccagctcaccagcgagatcgacgacagcagcctgcgcgcgcccatcgacggcgttatccagctacgcctggccgagccgggtgaagtgctgggcgcgggcggccgtgtactgctgttgatcgatcccaatgatcaacacatgaacctctacctgcccgcttccgtgaccggccgtctcaccgtcggcagcgacgcacgcatcctgctcgacgccctgcccgaccagccgctgccggccaggatcagcttcgtcgccgccaaatcccagttcacccccaaggaagtggaaacccgcgacgaacgccagaaactggtatttcgcgtcaaactgcgcctgacccaacccagcgctgtgccccaggccaaaccgggcatgcccggcgccggctatgtgcgcacggctgacatcgactggccggccaacctgcaatgaccgccctggcgctgcaggccacggggatcaaccaccgctacggcaaacagcaggccctggtcgacatcgccttcagcctgccggccggtacgcgctgcgggttgatcgggccggatggcgcgggcaagtcgagcctgctgggtttgatcgccggggttaaaaagctgcaggacggccagttgcaggtgcttggcggcgccatcgacgatcgccgccaccgcaacagcctgtatccgcgcattgcctttatgccccagggcctgggcggcaacctgtaccccgagctgtccatcagcgaaaacatccgtttctttgccacgctgttcggcctgtccaaagccgattgcgaccagcgcatgcacaacctgctgctggccaccgacctcgcacgcttcgccgagcgcccggccggcaagctctccggcggcatgaaacagaagcttggcctgtgctgcgcgctgatccacgacccggacctgttgatcctcgacgaacccaccaccggcgtcgacccactgtcacgtcggcgcttctgggaactggtcgacagcgtacgcagcgaacgcccgcaactgacattgctggtggccacggcctacatggaagaagccgagcagttcgaacactgcctgatgctcgatcgcggcaagctgatcgccgatggcctgagcagcgacttggccgccgcgacacccagcggcaaattggacgaagccttcacccacttccagggtgacagcgcccacgacaaccagccgctggtgattccgccgagggagagcgacaacaccgatgtcgccatcgaggcccatgacctgaccctgcgtttcggcgatttcaccgcggtgaacaaggtcagctttgcgattggtcgcggcgagatcttcggcttcctcggctccaacggctgcggcaagaccaccaccatgaaagtcctcaccgggctgatgccggccaccgagggcagcgcgacgctgctgggcaacccggtgaacgccaaggacctggccacgcgcaagcgcgtgggtttcatgtcgcaaagcttttcgctgtacggcgaactcagcgtgcgccagaacctggtgctgcatgcgcaactgttcgacctgcccaaggccgacagcggaccgcgcattgatgagctgatccagcgtttcgacttgggtgacgtcgccgaacaaccgtccggcgagctgcccctcggcctgcgccagcgtttgtcattggcggtggcggtgctgcatcgcccggaagtgctgatcctcgatgagcccacctcgggcgtcgacccagccgcacgggatgacttctggcgattgctgatcgagctgtcccgcgaacaaggtgtgaccatcttcctgtccacccacttcatgaacgaagcccagcgctgcgaccgcatctccctgatgcacgcgggcaaggtgctggcctgcgatacgccggatgcgctgcaacagcaattccacggcgatacgttggaagccgcgttcgtcacgtgcctggaacaggcccaaggtgaagccgaacccaccgcgccggccaagaccgtcagcgaaaccagcacagcgccagtgagtaaacgcggtttcagcctggcccgtctggtagccgtggccagccgcgaaggcaaggaactgctgcgcgacagagtgcgcatggccttcgccctgctgggggcgatgttcatgatggtgatcttcggctatggcatttccctggatgtggaaaacctcgccttcgccgtctacgaccaggaccagacgccgcaaagccgcgcctatctggaggcgtttcgcagttcgcgctatttcgctgagcaagcgccgatccaggactcgactgaactgcaccggcgcctgcaacgttcggaaatcaaactggccctggagatcccgcccggctttggccgcgacctctacgccggccgccagcccacggtggccgcgtggctggatggcggcatgccgtttcgcgcggaaaccagccgtaactatgtcgaggccgtgcaccaggagaacctgcagcaactggccgaactgagcagcctgccgcgcaacaccccggccgccgccaggctggaaacgcgctttcgctataaccaggacgtggtcagcgtaaacgccatcggccccggcgtgatggcgctgatcctggcgtttatcccggcgatgctcaccgcgctcggcatcgtgcgcgagaaagagctgggctcgatcaccaatttctacgccacgccgctgacccgcctggagtttctattgggcaaacaggcaccgtacctggccgtgagcctggtcaacctgacggtcttggtggcgatgaaccgctggctgttcggcgtgcccttcaagggcagcgccctcaccctggcgttcggcggcctgctctacgtgctggcgaccaccagcatgggcctgctgatttcggccttcacccgtacgcagatcgcggcgatcctaggcaccatgatcatcaccagtctgccgaccatccagttctccgggctgatcgtgccgcgctcgtccctggaaggcgcggcggccttgatgggcatgctgtttccggccgggcacttcctggacattgccgtgggcaccttcaccaaggccctggacctgcgccagttgtggccgcagtgcctggcgctgttcgggttcttcgtcgggtttaccgggctgagcctggtcatgctcaagaagcaggaggcctgatgcataagttcgcgcacattctgcggctggggatcaaggaactgaccagcctgcgccatgacagcgtgttgctgctgtttctgttctacgccttcaccgtcgccatctatatgcccgccgccggttcggtgatcggtgtacacaacgccagcgtggcatttgtcgatgaagaccacagcgctctctcgcggcagatggccgaagcgctgcaaccgcccgaattccaggcgcctgcaccgttggcctatgaccaattggacagagtcatggacagcggcaagtacactttcgtaatcaatgtgccggcgaatttccaggccgacctgttggcggggcgccagccgggggtgcaggtgaatgtggatgccacggcaatgagccaggcgttcatgggggcgggctacatcgggcggattttccagcgcgaactgctgacctacagcggacaagccgatgccgccagccgggcacccgcgcagctcactacccgggcgctgttcaataccaacctggaaggcggctggttcctggcggtgatccagatcgtcaacaacatcaccatcctcgccattatcctgaccggtaccgccctgctgcgtgagcgtgaacacggcaccctcgaccacctgctggtactgccgctgacggcgctggaaatcatgctggcgaaaatctggagcaacatgctggtggtggtgctgtgtacctggctgtcggtggaactggtggtcaagggcctgcttggggtgccgctggccggctcgctggggttgtttctgttcgtgaccgcgctgtacctgtttgccagtacggcgctggggattttcctggcgacgcttgcccgttccacaccgcaattcggcctgctggcaattccagtgattatcccgatgctgttgctctcaggcggcagtacgccgctggacagcatgcccgagtggttgcagtgggtgatgcaggggtcgccgtcgacgcattttgtgagtttgagtgcggcgattctgtttcgtgatgcgggggtgagcgtggtgtggccggatttgctggcactggcggggattgggttggtgttttttgcggtggcgttggcgcggttccgcaaaagcctcgcctcataagcctggatccggcttgttgtggtgagcgggcttgccccgcgctgggcnnnnnnnnnnnnnnnnnnnnnnnnnnnnnnnnnnnnnnnnnnnnnnnnnnnnnnnnnnnnnnnnnnnnnnnnnngcccagcgcggggcaagcccgctcaccacagaagccaggcccataacacttaggaggcttactggatgatcaggttgttgaacaacagatcttccaccaccggcttgcccgtctcgtcattcatcacttgctgggtctgcttcagggcttcctggcgcagtttttctttgccctcgacggtgctcatcgcctcgttggtctgctgggtgaacagggccaccaactggttacggatcaacgcatcgttggctttgacggcggcggccgcttcggtgccggtcacgcgcagggcaatgtcggccttgaacaccttgagtttcgccgtgccatccaggccgtagttgcccacgaacggcgggctcaggctgatatagctgaccttcggcgcctcgccctctttggcttcttcggcctgggccgccatcggcaaggtcagggccagcatcaacaggatccacgctttcacagttcattcctcacattcggttgccgggtagcataacgctagcaaggcagagcacaagcttatggcggcttatcaggcctgggcatgctcgttgacccacgggcgtaccctcctacacttatcggccacgacgccaaaaggaatagtccgatgaaagctgtgctgtgcaaagccttcggccctgccgaaaccctggtgctggaagatgtcgcaagccctgcgatcaagaagaacgaaatcctgctggacgtgcacgcggccggggtcaactttccggatacgctgatcattgagggcaagtaccagttcaagccgccctttccgttctcgccgggtggcgaagcggctggcgtggtcagtgaagtgggcgaaaaagtcggccacctgaaagtcggtgaccgagtcatggcgctgaccggctggggcagctttgccgaacaggtcgcggtgccgggctataacgtactgccgatcccgccgagcatggatttcaacaccgccgccgcgttcagcatgacttacggcacgtcgatgcacgcgctcaagcaacgggccaacctgcaagccggcgaaaccctgctggtgctcggcgcttccggtggcgtgggcctggctgccgtggaaatcggcaaggccatgggcgcgcgcgtgatcgccgccgccagcagcgccgacaaactcgcggtggccaaggccgccggcgccgatgagttgatcaactacagcgaaaccagcctgaaagacgagatcaagcgcctcacggacggcaatggtgccgatgtgatctacgacccggtgggcggcgacctgtttgaccaggccatccgcgccatcgcctggaacggccgcttgttggtggtggggtttgccagcgggcgcataccggagttgccggtgaacctggcgctgctcaagggcgcggcggtggtcggggtgttctggggttcgtttgcccagcgccagccgcaggataatgcggcgaacttccagcagttgttcacttggtacggtgaaggcaagctcaagccgctggtgtcgcaggtgtatccgttggaacaggccgcccaggcgatcaatgaccttgggcagcgcaaggcggttggaaaggtcgtcgtccaaacccgctaaaaatttgaaataccgtcaatgtgggagggggcttgcccccgatagcggtgtgtcagtcacagctatacagactgataaacagctatcgggggcaagccccctcccacttttcgatctccggtgttcgtaagggaacattcattagcgttcatttctggttgtttatagataagaggcgatgctattttcggtaacgaaactgtaacattcgcatccgcagtcaaaacaagaaatctggagctcttgaatgtttgctttctttcgtcctgccgcacatcaggcgcccctgcctgaagaaaaaatagacagcacttaccgacgcctgcgctggcagatcttcgccggtattttcttcggttacgccggctactacctgctgcgcaaaaacttctccctggccatgccctacttgatcgacgagggttacacccgcggcgaactgggcctggcgatgtcggccatcgcgattgcctacggcctgtccaagttcctcatgggcctggtgtccgaccgctccaacccgcgctacttcctgcccttcggcctgctggtttccgccggggtgatgttcattttcggtttcgcaccctgggcgacgtccagcgtgaccatgatgttcattttgctgttcatcaacggctgggcccaaggcatgggctggccgccgagtgggcggaccatggtgcactggtggtcgcagaaggaacgcggcggcgtggtgtcggtgtggaacgtggcgcacaacgtcggcggcggcctgatcggcccgctgttcctgctgggcatggcctggttcaacgactggcatgcggcgttctacgtaccggctaccgtggcgttgctggtggcggcgtttgccttcatcaccatgcgcgacaccccgcaatcggtcggcctgccaccaattgagcagtacaagaacgactacccggaaggctacgacgccagccacgaagatgaattcagcgccaaggaaatcttcgtcaagtacgtgctgcgcaacaaaatgctgtggtacatcgccttcgccaacgtgtttgtctacctgctgcgttacggcgtactggactgggcaccgacctacctgaaagaagccaagcacttcacggtggataaatcgtcgtgggcgtacttcttctatgagtgggcgggtatcccgggcacgctgctgtgcggctggatgtcggacaagatcttccgtggcaaccgtggcctgaccggcatcgtgttcatggcgctggtgaccgtggcgaccctggtgtactggctcaatccgccgggcaacccgatgatcgacatgattgcgctgttctccatcggcttcctgatctacggcccggtgatgctgatcggcctgcaggcgctggaactggcaccgaagaaagccgccggcaccgctgctggcttcaccggcctgttcggttacctgggcggctcggtggcggccagtgcggccatgggctacaccgtcgaccatttcggctgggacggcggtttcgtgctgctgatcggcgcatgcctgctggcaatcgccttcctgatcccgacgctgtggcacaccaacagcgtcagttcggcgcgctaagcacctgagcaaccctttgcacaacgcttgagccgcgcctccaggttcttatctggcatggcgtggctgcgcagggcgttgacggtctgctcgacataatcgcgagtggtgccgtaacgcccgcaagcactttgcagcacatggttcagtacgatatcgggcaagttaccggcgtagctgggcaagtgccgctccaacacaaaccccagcgcctgtacggtactgccatcttccagacggcagctgagccagtgtggccggtaggacgggtaaggcatctcgcgctgccacagggcgtacagcgaggcttccagctgatcttccggcaaacggtaggcaaacccgctgcaggagcccccacgatccaggccaaagaccagccccggcagctccggcgtaccccgatgctcatgggaccacaggtacaggccccggtgataaccgtggacccgtgcccgcacccgctcggtcgaggagcattcagggcgccagatcagcgaaccataagcgaataaccagaccggcccacccttatgccgcgccatggtggcctgcatcgagctcatcaactgttcgtgagtgagttgcggcccaagatcgagccgcggagggtaagccaattgcaaaagatcggattcaataacggtcatggcaaatcgcttaggtctcctgtgctttaccagttgtaggcaactttaccgtaatagaacgcaccgctgtaaccgtacggcgaaaaagtgctataggccaaattgccaccgctgctggcgaaggcattgaccttctcagggtatttatcggtaacgttgtcgccacccagggtgaaggtccagttcttcaacttatagtccgccgacaaatccagcacccaggccgccttgaaggtctggtcgttgaccttgtctgcctggtagctggtgaattcaccatagcgcaccaggttgctgtgcagcgcccaattgccgaatgtgaagtcgttacccaggctcagtttgtgctcaggcgtggtgtcgcccagcaagccgctcttttcgcgacggtccacccgcaccaggttggcacccaggctatcgaggatggccgggttgggcttcacgtccgtcacccgggtatggttgtagttgtagcccacggtgctgttccagcggatgccgttatcgaattgatagcgatagttggccaccaggtcgacgccgtcggtgctggtgtcggtggcattggtgaagtagcgggcggtggtgtagttgatattgccgacaccgttggcgcgcagataggcctgggtggccgggtccagattgaggttggacgacaggctgatacggtcgcggatatcgatgcggtacacgtccacggttactgtcaggtcgtcggcaggctccagcactaggccaaggctatagttgcgcgacttctcggccttgaggtcttccgcgcccagcaggcgggccacctggctcgatgccgggaaagtgccggcctcgcggatgtcactgccgatcaactgcgacgaggtaaacgcaaagttctgctgcgccagggacggtgcgcggaaacctttggagatactgccgcgcaaggccacctgcggggtgaagtcgtaacgggccgacagcgaaccgctgacattggagccaaagtcactgtaatcctcatgccgcacggcggccgatgcgctgagtttttcggtgaagttggtttccaggtccaggtactgggcccagttgtggcgcgaactgctgccggcgtcggcatcacggaagccgccgaggcccgagctgccggtctggtagtaggacgccggttcacccgcttcaatctcatacccctggcgcaggtattcaccgccaaaggccacggagaccgggtatggcaggaagcccacgtcgaactcacgggacaggtcgaggctgacttgcttctggtcgttgctcagggtgccgttgtcgaacttgcgcggcgtggccaggcccagggaggtgttgatggtttcggtgctcaactcgtactggttcttgccgtagttggccgagaggtcgtagtgccagtcgtaggcaaacagcccgcgcaggcccaccaccagcgaggtgtcctccaggttgcccttgatcaacggcaggtagccgttggggttgagcgccgcaatgttgttggaagcgttgctcgcccggtagaacgccgccgtctcgccgcgccgcttgctgtagccgccgaaagtgtagaactcggcggcatcgttgaacgaatattccgagttgaactgcaacttgccttcattggtggccggttcgccctggcggaacacgcgctggccgtaggtggtggagccgacactggctgggcggtaatcattgccggcacggttggtgtaatcgttatcggcaccttcggccgagaggttgatgaagccgctatcacccaatgccaggccggtattgccgctgacattacgctggataccgtcgcccttcttgtattcgccgaacttggtagagatcgagccgccatggtcggcgtgcttgaggatcacgttgatcaccccagcaatggcgtccgagccgtagcgcgcggaagcgccatcgcgcagcacctcgatatggtctaccgccgacagcgggatcgcgttcaggtccgctggcgccgagccgcgtcccaccgcaccgcccaggttgacgaacgcgctggtatggcgacgcttgccgttgaccagcaccagcacctgatccggcgacaggccgcgcaactgcgcaggacgcaccagctcagcaccgtccaccaggctcgggcgcgggaagttgatcgatgggatcagccgcgccagcactgcgcctagctcatcggagccggtgctgcgcagggtgtcgccggaaatcacatcgatgggtgacagcgaagcactggccgtacgctcctgggcgcgggtgccggtgacgatcacggtgtcgagcttgggtgtatcggtggccgacgtttcggccgcgaagacaggattgaaacccacggcggccagcaaattggctgacaaaatcgccgtgtacagcgcgtgttgcttgtagctccccataccgctcccctttgaatcaaaaaccagaacgtcgtgctctgagttcttacgatcgatccgactggcgggcggtggcggtcagtgattagtggttgtgaaagagtcggtagtccgttgcgatatagcttaaggatatttatgtaacaaattaaatacctttaaagcataagtgattgcataagcaaactcgcccattcatcaggattgcgcgggccaatcccggtagtttcagccccggttcagcctgggaacgtgccaaaccgtcaaaatggcgcccaccttatgacccacctagccgagcatcaaaccgactatcgaggtcgcacccatgaaaaaattccgactgcctggcctgctgttcctggcccaggccaccaccgccctggcgggcgaaacaccggccaccgaggacgacaaaggtttctggtacgcgcagaccagcgtctacacccggcactttgcgccggacccggaccacaacaacaaccaggacctgatcggcctggagcgcaatgaagcctcaggctttgtgtatggcggggcgacgtttcgcaactcgttcagccagcgctcgtactacgcgtacgcgggtaaacgctacgacatggccgactatccggtgtatttgaaactgacgggcggggcgatccagggctatcgcggcaagtaccgcgacaagatcccgttgaaccgtttcggtgtggcgccggtgatcattccgtcggtgggcacgcattacgggccagtggcggcggaattggtgttgctggggttcaacgcagcgatggtgacgaccggcgtacgattttaagcacgcggcgcataggcaaacacgtcggcgcgcatctggtgcgcatccatgccggcttcgaccagcgcatccagggtgccatagatcattgccggcgagccgctggcgtagacgtgcaccgacttgaggtcggcaatgtcttcgcacaccgcttcatgcaacaacccgcagcgcccttcccaaccgcacaggtcgctgacgactttgtgcaaaaacaggttgggcagttgcaaccattggtcccagtgttcgatctcgtagaaatcttccgggcggcgcacgccccagtacaggtgcactgggtgcttgaagccggaggcgcggcaatgttcgatcaggctgtgcatctgcgccatgccggtgccggcggcgatcaacaccagcggcccgtccggcagctcggccaagtgggtgtcgccaaacggcagctcgacgcgagccatctggttgcgttgcagttgcgcaagcaaagtgcgggcactgtcctcgcgggccagcacatgcaactccagctcacgtccggcatgaggcgcagaagccagggagaatgcggatttctcgccgttctcccgctcgatcatcaggtactggccggcgtggtaacgcaccgccttgccggccggtgcacgcaggcgcacccgccacacgtcgccaccgacctctacgcattcactcaattggcacgacagtttgcgcaacggcaactctcccggcgccagcacgccatcccacaacacaacgcaatcttccagcggctcggcaatgcaggtgtagaactcaccgtgatcacgcacttcaccggcctgctgtacgcggccttccaccaacagcgcggcgcacacatggcacacgccgttgcggcaggcctgtgggcactcgtagcccaggcgacgcgcgccttcgaggattcgctcgccagggaccagttccagcacggcgccggaaggttgcagggttacacgcatcaatctattcccaattctttccagatcgcatcgacacgggcggtgacggcttcatccttgacgatcacccggccccactcgcgggtggtttcgcccggccatttgtgggtggcatccaggcccatcttcgaacccaggcccgacactggcgacgcgaagtcgaggtagtcgatcggcgtgttgtcgatcatcaccgtgtcgcgcttggggtccatgcgcgtggtgatggcccagatcacgtcgttccagtcgcgggcgttgatgtcgtcgtcggtgacaataacgaacttggtgtacatgaactgtcgcaaaaacgaccacacaccgagcattacccgcttggcatggcccgggtacgacttcttcatggtcacgatggccatgcggtacgagcagccttccggcggcaggtagaagtcggtgatctccgggaattgcttctgcaggatcggcacgaacacttcgttgagcgccacgccgagaatcgccggctcatcgggcggccggccggtgtaggtgctgtggtagatcggcttgatccgatgggtgatgcgctcgacggtgaagaccgggaagctgtcgacttcgttgtagtagccggtgtggtcgccgtaagggccttcatcggccatttcgcccggatgaatcacgccttcaaggatgatttcggcggtggccggcacttgcaggtcgttgccacggcatttcaccagctcggtgcggttaccgcgcagcagaccggcgaaggcgtattcggacaggctgtcgggcactggggtcacggcaccgaggatggtggcggggtcggcgcccagggccacggagaccgggaacggtttgccggggtgcttttcgcaccactcacggaagtccagcgcgccgccacggtggctcagccaacgcatgatgaccttgttgcggccgatcacttgctggcgatagataccgaggttctggcggtccttgttcgggcctttggtgacggtcaggccccaggtgatcagcgggcccacgtcaccgggccagcaggtctgcaccggcagcatggcgagatcgacgtcatcgccttcgatgaccacttcctggcacaccgcgtccttgaccactttgggtgccatggcaatgatcttgcggaagatcggcagcttcgaccaggcatccttcagccccttgggcggctcaggctccttgaggaaggccagcagcttgccgatctcgcgcaattcgctgaccgactcggcacccatgccaaaggccacgcgttcgggcgttccgaacaggttgccgagcaccgggatatcgaagccggtcgggttctcgaacagcagcgccgggcccttgttgcgcagggtacgatcgcaaatctcagtcatttccagcaccggggaaatcggcatctggatacgtttcaactctccgcgctgctcaagttgctgcacgaaatcccgaagatccttgaatttcattaaccatgccacccgtaaaataggcgtacatcctacctgctccagggtgcgtttgcctgccagcagcgcttaaaaaacgggcacaaaaaaatggcgcccctgggggcgccattcttcaggacctgaaacgtcgtattacttacgcttcatcgacaggaagaactcgtcgttggtcttggtggttttcagcttgtcgaccaggaactcgatggcggctacttcgtccatcgggtgcagcagcttgcgcaggatccacatgcgctgcagctcgtcgtcagcggtcagcaactcttcgcggcgggtgccggaacggttgatgttgatcgccgggaacacgcgtttttccgcgatgcgacggtccaggggcagttccatgttgccggtacccttgaactcttcgtagatcacttcatccatcttcgaaccggtttcaaccagtgcggtggcgataatggtcagcgagccgccttcttcgatgttgcgcgcggcgccgaagaaacgtttcggtttctccagggcgtgggcatcgacaccaccggtcaataccttgccggagctcgggatcacggtgttgtaggcacgggccagacgggtgatggagtcgagcaggatcaccacgtccttcttgtgttcgaccaggcgcttggccttctcgatcaccatttcggcaacctgcacgtggcgggttggcggctcatcgaacgtcgaggcaaccacttcgccgcgcacggtgcgctgcatttcggttacttcttccggacgttcatcgatcagcagcacgatcaggtgaacttcaggattgttacgcgcgatgttcgctgcaatgttctgcagcatgatggtcttgccggctttcggcggcgcgacgatcaggccacgctggcctttgccgatcggggcgcacaggtcgatcacacgaccggtcaaatcttctgtggaaccgttaccggcttccatcttcatgcgcacggtcgggaacagcggggtcaggttctcgaagagaatcttgtttttcgcgttctcgggacggtcgaagttgatcgtgtcgaccttgagcagggcgaaataacgctcgccttccttcggtgggcggatcttgccaacgatggtgtcaccggtgcgcaagttgaagcgacggatctggctcggcgagacgtagatatcgtctgggccggcgagataggacgcgtcagcagagcggaggaagccgaagccgtcctggagaatctccagcacgccatcaccggagatttcctcgccgcttttcgcgtgcttcttgagcagggagaaaatcacgtcctgcttgcgcgaacgggccatattttctatgcccatttcttcggccaattggagcaggtcggtaatcggcttttgcttgagttcagtcagattcatataggaatgacgtaatcatttatggaggggggaaattaagcttttggcttaatgaggccgcgccgcagagaaggcgacaggatcgcgtactaatcgaaaaggaatgcgtcggcgacggcttgcagggggcagtggagaaaccagtgcggggccgaatgtaccacctgagtttcggagcgtctagccctgtttcacgaaaaagccccgctatttgcggggcttttttgacgacgcttagatgttcgcgtcgaggaaagcttgcagctgagacttcgacagcgcgcctactttggtcgcttcgacgttgccgttcttgaacagcatcagggtcgggataccacgcacgccatgcttggcaggggtttcctggttatcgtcgatgttcaacttggcaatggtcagcttgccttcgtaggtagtcgcaatgtcgtccaggactggagcgatcattttgcaagggccgcaccattcagcccagtagtcaaccagcaccgggccttgagccttgagtacttcggcctcaaaggtcgcgtcggtgacgtgcttgataagatcgttgctcatggatgtctccggattgtaagcaaaaaaaacgtggcccatcatagctgcccttcccccgttcaggaagccgcctctgattgagtcttcctatgatggcccatgagtttgggtatcgcccaactcagggcgtgacgggggtcacgaaggcaataccggtgcgcaacgccgcattgcgcacgtgttcctgcatggttttctgcgccgccgcgctggcgcgtcgggccagggcgcgcactatccggcggtgctcctgccaggtttccatggcccgttccggtcggatgaacggtagcttctggctctccagaaaaacctcggcactcgcgctcaggatgctcaccatcgcctggttgccactggcgagcaggatgcgctggtgaaattcgaagtcgagccgggcggcggcttcgaagtcgccggccttgaggaccttgcgcatggcctcgacattgtcttccaggctgtccaactcatcgatggtcagcgtcaccgccgccagccccgccgcaaaaccttccagggcatagcgcaactggaagatatccagtggcgtggcctgcgcagcgaagggccaggcaaaccccggcgcctcctcggcggtctgcacgaacacgcccttgcccggctgcacactgaccacacccaacgcgctgagggatgacaacgcctcgcgcaacgacgcccggctcacccccaactgcaccgccagatcccgttgcgacggcaacgcatcgcccggtccgaagccttgctccttgatcagtttgcgaatggcctgcagggccgcttccggtacggcttgggcgatggaattcataaaaaactcaaggttccagtcaactgagtggctagttgtaaagctattcgtggcgggcggcaagccacgccccaaaggggctcgcgaggttttgccgacgctcgaaaacagtgcgcaaagcccctgcactgttcagaccagtccgaccaccaaaactcaataaatactggccctgcagacgattcagaaggtgatggcatgcgctgtgcactgggcaaatccagaaaatcccttcgcccttctcggagagttgccatgaccaagcgctacagcgccctgcttactgccctgtttgccagcctgatgctgagccaggcacccgcccaggccaatggtctggacgacatcgtcgcccgtggcaccctcaaggtcgccgtaccccaggacttcccgcccttcggctcggtcggccccgacatgaagccacgcggcctggacatcgacaccgccaagctgctggccgaccagctcaaggtcaagctggaactgaccccggtcaacagcaccaaccgtatcccgttcctcaccaccggcaaagtcgacctggtgatctccagcctgggcaagaaccctgagcgggaaaaagtcatcgacttctccaaggcctacgcaccgttctacctggccgtgttcggcccgcctgacgccgccatcagcagcaccgacgacctcaagggcaaaaccatcagcgtgacccgtggcgccatcgaagatatcgaactgaccgccgtcgcccccaaggaagccacgatcaagcgcttcgaagacaacaactcgaccatcgccgcctacctggccggccaggtcgacctgattgccagcggcaacgtggtaatggtggcgatcagcgaacgcaaccccaaacgcgtacccgcgctgaaggtgaagctcaaggactcgccggtgtacgtaggcgtgaacaagaacgagccggccctgctggagaaggtcaaccagatcctgatcgcggccaaggccgatggcagcctggaaaagaacgctatgcaatggctgaaagagccactgcccgccgatctctgaaagcggagctgacccatggcgtatcaatttgactttgtgccggtgctggccaacaccgacctgctgctgcgcggcgcgctgttcaccctcgagctcacggccatcggcgccatcctcggcgtggccctgggcaccgtcggcgctgtggtgcgggcgtggaagatccagccgttcgcctggttcttcggcgtttatgtcgagttgatccgcaacacgccgttcctggtgcagttgttcttcatcttcttcggcctgccgtccctggggctgaagatcaccgagtggcaagccgccgtgctggcgatggtgatcaacctgggcgcgtactccacggaaatcatccgcgccggtatccaggccattccgcgcgggcaactggaagccgctgccgcgctggcgatgacgcgcttcgaagccttccgccacgtggtactgctgccggcgctgggcaaggtgtggccggccctgagcagccagatcatcatcgtgatgctcggctcggcggtgtgctcgcagatcgcgactgaggagctgagctttgccgccaactttatccagtcgcgcaacttccgtgcgttcgaaacctatgccctgaccaccctggtgtacctgtgcatggcgctgatgattcgccagttgctcaactggatcggccgccgcttcgtaatgaggaacagtcgatgagtgatttctcgttctgggacatcgtgcgcaacctggccaccggcctgcaatggacgttgctgctgtcactggtggcgtttgtcggcggcggcgtgatcggcttgctggtgatgacgatgcgcatcagccgcaacgccttcccgcgcaatgtcgcacgcacctatattgagctgttccagggcacgccgctgttgatgcagctgttcctggtgttcttcggcattgccctgctcggtgtggatatctcgccctggctggcggcggcgattgccctgaccctgtttaccagcgcctacctcgccgaaatctggcgtggctgtgtcgactccatcgcccacgggcaatgggaagcgtcggccagcctggcactcaacccgctggagcaactgcgctacgtgatcctgccccaggcactgcgcattgcggtggcaccgacggtgggcttctcggtgcaggtggtcaaaggcaccgccgtgacctcgatcatcggcttcaccgaactgaccaagaccggcggcatgctcgccaacgccacgttcgaacccttcatggtctacggcctggtggcccttggttacttcttgctctgctaccccctgtccctcagtgcccgctacctggaaaggagactgcatgcctctgcttagaatttccgccctgcataagtattacggcgatcaccatgtgctcaagggcatcgacctgaccgtggatgaaggccaggtggtggcgatcatcggccgcagcggctcgggcaaatccacgttgctgcgcacgctcaacggcctggaatccatcaacgacggcgtgatcgaggtcgatggcgaatacctcgacgccgcccgtgcggacctgcgcagcctgcggcagaaagtcggcatggtgttccagcagttcaacctgttcccgcacctgacggtcggcgagaacgtcatgctcgcgccacaagtggtgcagaaagtacccaaggccaaggcagcccaactggccaaacagatgctggaacgcgtcgggcttggcgagaagttcgacgccttccccgatcgcctgtccggcgggcaacaacagcgtgtggcgattgcccgcgccctggcaatgtcgcccaaggtgctgctgtgcgatgaaatcacttcagcgctggacccggaactggtcaatgaagtgctcagcgtggtgcgccaattggccaaggacggcatgaccctgatcatggtgactcacgagatgcgcttcgcccgggaagtcggcgacaagctggtgttcatgcaccagggcaaggtgcatgaagtgggcgacccgaaggtgctgttcgccaacccgcaaaccgccgagctggccaacttcatcggttctacggaacagccgaactgaccagctcgaattgaccacgcccctccagcagcatctcccgacgtactgagagggcatcggccggcaattgaaccgctatctccaccagggccgtcagccgacggcccgtcaccggcgcatcgcctgctgtcgcatacaacgcccgccccggtaacagctgcccaccagaggcttcatcgggctgccacgacaccggcctgccgtcgacctgagcctgcctcaggttcaaggtgaaacgcccttgccgcccgaattgaaagccttgtgcatcggcggcgacaccgctgaaacgcagcgccattgccgcaggatccgcgcaaagcacgctcaggtgcagcgtacgcggcgtgtcgagcgtcattgtcgccctgccggaggacgcttgcgaagggcgaatcaccccgtagtcgacccggtgctcgctcaaggtcatccggcagttttcagcctgcgcctggctcgccacaagggccacccacaacagccacagacttcggcgtttagcgagcatggcagaccaccggcgcggtttcatagaattggtcatcgtcaggctcttgctccggattgacttgcagcagacaggattgcgaattcggtaatgaaaccttcaaggttttcagcccatcgatgttgctgaggaaaatcatgccctcacccaccacactggtcacaaaactgttgtcctgcccgaacaccgccgccccttgaggcaagggccgaccctgttcgtcctgggcttcgagcaatagacgacgcactttcaccacatcaaagttgagaatattgactgacccacgaccggcagcgagcactttggtcccgttcttcaagtcgacgcgtttgggcagcgactgggtctgaacctgcagatggttgttgctgtaggcctgcagaccggggatcactgcctgaccgctgaaatcggtccataccggcccttggggcgtcgagaccttggccgctccgatatctcccaccgacacaatgccaaaggtgtcctgcacggcatacggcgagaaggtcacgccgtgctcatgggccacgatgccgccttgcagttggccggaatagttggtgttcgacgggtcacggctgacgcccaggctcacgcgggtatacagcggcaagacatccacacgaccacgcacgctttgctcccgttctttcacgtcccgatcaacaccgacttcatagttcacatagtcgttgacccgctcactgagcgcggtaccggcatccagccggtcacctcgacgactgacgtaagtgctcatgcgccgatcattgccgaggggcatcgtgacctgcagcctgacagacgtaccctcgtccagccgctcgtcgcggcggccacctcgaattgggtccgggcgccgaggggcggtcgcaccgacctgagcgtcggcgatgagtgcgacacccacgccattgaaggtgtcgttccatgaggcaaagaggtgatcgttggattgcccgtcaaactgcgagttacgggtgaaaccgagggagaaaccacccagggacggcgccgcccagctcaaacctgccgtgtactggcgtttgaaacgcgcatcgaggttatacccccgcgacgcctgaccggcgtccagtacctcccggtagccgcggctctgcgtcgaggcgctcaggttgatatcaaggttggcgaataatggagtccccaaagacagcgtgctacgtgcaccgcccacctcatcttgagcatcacgggacacgttatggcgcacgcccacggtcacccgatggaaaaacacactgctcagggccccccctgccgactggtactcatcggtacccagcaaaccgaaacccagcgacgaatgcggactaagcccccaagtgccgctgcccatggcgaccacgggcgactcccgactttcggtagacgtttcacgcaccttaccgagggaaaagtagtagcccggcgcaaccggaaccccaccacgaaaggaagcagcaggcaccacgaaactgcgctttgccccacgcacgtcgatcacgctcacatcgaggtcgctggtactgttcagcaacggtaaaccggtcagcctgaacgggccttccggcaccagggtggagtgaatcaatgcgcccgactgacggacttcgacccgcgactgactttgcgccagcccttcgactaccacgttgctgtcgcccgcgccggtacgctgctggccatccggggagaactgcaagccggtcagctgtaccccgccaaagatcgggttgttgctggaaatctgtcccacctggaaggtcgactgcaacgccgcgatgtcacgctgggcataggcattcacgtgttcggtgcgcgtcttgccattgtcggaaacataaaactggcgactgcgaacaatccagttccccaggttgaatcccgcctccgtataggccgatacgaagcgacttggcccactgcgcgagtgggtatcgaaacccaatacgtcgtagttgaagatggcggccgcgccaccctcggaaaaattaccgccctcccattccggtgctcgcagggactgggtcggcaccaccagggtgacctcatcgctgctggggcgcagccgcaccatggtcgctgggtattctccaacaaaatcatggcatgcctgatcgggagtaacgccctcgctcagaagcctggacggggtgatcagaccggcctttgccagtaacgccggggtgaagcacaactgaccctggtaatcgaaacgggcgtcaaccaatcccagcggcgtgccattgactcgcagtccgactatatggacaccttcgcgaaagcgcgctgcgctgcgaaagtattcagacacctgtggatcaatcccgagggagttcaatgcgaccaggtcaaagccttcccccagcccaaccgctgcgctcgtgcctggcagactccacagcgtcgcgagccccaataaaaacctggagcgcgcctgggcggaaccactgcacggtacccgtttggcggggcgacctgattgccggatctttttcataggcccgtcaatccgcttctgccgtgacgggcgtgcggtaactgtccaccgtaaacccatacaccgtggccgggtgaatctccaccgccaccactcccgccaccgagcctgccgacgcgagcgtcagcacttcgcccggcaggatgtaggttcgcggcaacgttgctacgcttgcctgcggatgcagctgtacttccatccccaggcggacgacgtaagcgctgttgttgtggaccctcaactgatcccctttacgttcccatgtcagcaactgccagggcgcgtcatgcctgggtaagcctttggggtgcaggatcaatggcaggctctggcgcaaggtgataccaatggtcgcagcgccgggcgcacgtgcctcagggataccttcaaaggaaacgcgtttcaggcgctgggtcttgagcggctgcttggcggtactgatgaagcgaacaagttgtgtctcgcccgcttcaacccgagtaatcgggggcgtcacgatcaacaagtgttcgaggtcttcgggtatgttttgtatgactgaatgaagcaaggcagggccaggatccgtgtttttaatattaagcgttgcctcgccttcttcttcattcagaataacaacggttgtttcgggctgcatgccgtcggctacggccatgccgcacaaaaaaagggacacgcttatatatcgcaacagcgacataacggttattgataaaacattcaccgattttccccacagccaaaaagtcgaacatcaacaattgcacacattaaaactgccgacatttagcggagacacgaaagtatcttcagcttaatgtcggctgttaaaggcgtagttagatgtaatccactgacagactggtgcgaccgtccagcgttacatcgcgggtcaggtccaaatcgttcgtgcggttgataacggctttcacttcaagcatgccagtcagactggtgatgaatgcaggcaccgcagtggtaccactacgccacgaatactgggcaggcgattgggcgaccttgccgtcactgcttccccacgccgccccctgactgctgcgcatgatggggttcagggccccgctggacgattgcaggtttttgagagtaacggagtacccaccggtacgcttgccattggcgatacccaggccgtagttttgagcctcggtgaacccagcaccgaggatgcctggcaccttgctcgcggattgcaggtcactcagcgctactcgaaactgcgcgggcgtttggccgcaactgatgttcaagttgaccgtttttggtgcaagagaagtgaactgcgtcggggacaggcttgcggctggaattgtctggtaatcgacgatgccgccgccggtgaggctaaggttgcaggccaccggtttgatagtccctcgtacaatcagttcagccacattcgttgcatgagccccgatactcgcggccaggcaaagaacacccactgtcataccaagcatttttttcatagttaacctgtcatctgtaatcagcaggtgaatttacgatgataagaattctgaccatacataaataacaccacggcgaaattgccggatgacagtctgtcgttttggcgcccgattaaagaatcagatggggcgccagttgttgtgggaaccgtaaaaacaaacagtgagccatatcaaaacaccgagtaggcacaaatacataaccaataaattattaaccgcccccttgtaggcaaaatcataaacagcatgatgacaataaaaagttaaagactcctacaaagataaaaccgctttcgttgagagccctgaaaaccgccttacatttcccacaagaattcctcacagacacccgcaggaaaattaccggcgcactacgcgttggctccagcggtcgatcgtggcacgatggtcaggttatcgaccgagaccccaaaccatgccgcaatcccaagccaagaatctgtccctgatcgccgccatcgacctgggctccaacagctttcacatggtcgtggccaaggcccagaacggcgaaatccgcatccttgagcggctcggagagaaagtgcaactggctgccgggatcgacgacgagcgccagctcaatgaagaatccatgcaacgcgggctcgattgcctgaagcggtttgcgcaactgatcaacggcatgccgctgggcgccgttcgaatcgtcggcaccaacgcgttgcgtgaagcgcgcaaccgtggcgaattcatccgccgcgccgaggagatcctcgggcacccggtagaagtcatctccggccgtgaagaagcccgtcttatctatctgggcgtgtcccacaccctggccgacaccccgggcaaacgcctggtcgccgacattggcgggggcagtaccgaattcatcattgggcaaagattcgagccattgttgcgcgaaagcctgcagatgggctgcgtcagcttcacccagcgctacttcaaagacggcaagatcaccccggcgcgctacgcccaggcctacacggcggcgcggctggaaatcatgagcatcgagcacgccctgcatcgcctgacctgggatgaagccatcggctcgtccggcaccatccgcgccatcggcctggcgctgaaagccggcggccatggcaccggcgaggtcaacgccgaaggcctggcatggctcaagcgcaagctgttcaagctgggggatgccgagaaaatcgacttcgacggtatcaagcctgatcgtcgcgcgatcttcccggccggtctggcgattctcgaagcgatcttcgatgctcttgaactgcaacgcatggaccactgcgacggcgccctgcgtgaaggcgtgctctacgacctgctgggtcgccatcaccacgaagacgtgcgtgagcgcacgctcacttcgttgatggagcgttaccacgtcgacctggaacaagccgcccgcgtcgagcgtaaagccctgcacgccttcgaccaggtggccgaagactgggacctggaagacggcgtctggcgcgaactgctgggctgggccgcgaaggtgcatgaagtgggcctggacatcgcccactaccattaccacaagcacggcgcctacctgatcgagcactcggacctggccggtttctcccgtgaagaccagcaaatgctcgccctgctggtgcgcggccatcgccgtaacatccccaaggacaaatttgctgaattcggcgacgaaggcatcaagctgatccgcctgtgcgtgctgctgcgctttgcgatcctgttccaccacatccgtggcacccaggaaatgccccaggtgacgctgcgtgccgacggcgacagcctggacgtggtgttcccgaaaggctggctggatgagaaccaactgacccaggcggattttggccaggaagcggagtggttgacgcgagtggggttcagcctgaacctgcgttgacctgacctgaagaacgctgcaaaacaaatgtgggagggggcttgcccccgatggcggtggaccagtcaatgaatctgttgactgacactccgtcatcgggggcaagccccctcccacattttcagaccgcgtcggtttttaattcaccgacagaatcgggctacccaacttctccaacaacgtcgcctgcgcactgcgcgggttctggttgccggtcggcgtgttgcgcacgtagcgaccgtccgactgcaggctccagctgtgggtgttgtcggtgaggtagctttccagctccttcttgacccgcatgatcaacttcttgccttcgaccgggaagcaggtctctacacgcttatcgaggttgcgctccatccagtcggcgctggagaggaacatctgctcttcgccgccgttgaggaagtagaacacccgcgtgtgctccaagaagcggccgatgatcgagcgcacatgaatgttgtgcgaaaccccgacaatgccagggcgcaggcagcacatgccgcgcaccactaggtcaatgcgtacgccggactggctggccttgtacagcgcgcggatgatcttcggatcggtcagcgagttgaacttggcgatgatgtgcgccggcttgccgtcgagggcgaactgggtttcgcgggcaatcatgtcgagcatgcccttcttgagcgtgaacggcgcgtgcagcagcttcttcatgcgcaaggtcttgcccatgccgatcaactggctgaacaatttgccgacgtcttcacacaaggcgtcgtcggaggtcagcaagctgtagtcggtgtagagcttggcgttgccagcgtggtagttgccggtgcccaagtgggcgtaacgcacgatctcaccggcttcacggcgcaggatcagcatcatcttggcgtgggtcttgaagccgaccacgccgtagatcaccaccgcaccggctgcttgcaggcggctggccagttgcaggttggactcttcgtcgaaccgcgcacgcaactcgatcaccgcggtgacttccttgccgttacgcgcggcgtcaaccaaggcatcgacgatttccgagttggcaccggaacggtacagggtctggcgtacagccaacacatgcgggtccttggcggcctggcgcagcaggtcgaccacgggcgtgaaggactcgaacgggtgcagcagcaggatgtcctgcttgctcaccacgctgaagatgttctcgctgttttgcagcagtttcgggatctgcggggtgaacggcgtgtattgcagctccggatggctgtccaggccggtgatgctgaacaggcgcgtcaggttcaccgggccattgacttgatacagctcggtctcgcccaggttgaactgcttgagcaggtagtccgacagatgtttcgggcaggtgtcggccacctcaaggcgcaccgcatcgccgtagcgtcgcgagaacagctcgccgcgcagggcacgggccaagtcttcgacatcttcggagtccagcgccaggtcggcgttacgggtcaggcggaactggtagcagccttttaccttcatgccctggaacaggtcatcggcatgggcatggatcatcgacgacaggaatacatagttatcaccagcgccccccacctcttccggtaccttgatgatccgtggcaacagacgcggcgccgggatgatcgcaaggcccgagtcgcggccaaaggcgtcgataccttccagctccacgatgaagttgaggctcttgttcaccagcaacggaaacgggtgcgtcgggtccaggccgatcggtgtgatgatcggcgcgatctcgtcgcggaagtaacgacgcacccaggtcttgatcttggtggtccagtgacggcggcggatgaagcggacctgatgtttttccagctccggcagcaggatgtcgttgaggatcgcatactggcggtccacatggccgtgcaccagctcgctgatgcgcgccagtgcctggtgcggctgcaggccgtcggcgccggcctgttcacgggcgaaggtgatctgcttcttgaggccggcaacacggatctcgaagaactcatccaggttgctggagaagatcaacaggaacttgagccgctccagcagcgggtaggactcatccagcgcctgttccagcacgcgaatgttgaattgcagttgtgacagctcgcggtggatgtacaggctgctgtcatccaggttggtcaccgccgctaccggggccggcacgggcggttcggccaccacgacgggcgcggcgggctcatgctccggcggggtctcggtgacttgttcaaccaccgggtgagcgtcttttacggcaacttctgtgagtccttcggtattcatcgagtgttcctgtgagggctattgttgctctctaagcaattgggcggcgcgggcggcgaagtaggtcaggatgccatcagccccggcgcgtttaaaggctgtcagggattcaaggatcaccccttcactcagccatccattctgtattgcagccatgtgcatcgcgtattcgccactgacctgataaacaaaggtcggcaccttgaattcgtctttgacccgataaaggatgtccaggtacggcatccccggtttgaccatcaccatatcagcgccttcggccaggtcggccgccacttcgtgcagggcttcatggctgttggccgggtccatctggtacgaggccttgttggccttgcccaggttcagcgccgagcccaccgcatcgcggaacgggccgtaataggcgctggcgtatttggccgagtaggccatgatccttacgttgacgtggccggccagctccagggcttcgcgaatcgcctggatgcggccgtccatcatgtctgacggggcaaccacctgggcgccggctgccgcatgggacaaggcttgcttgaccagcgcatcgacggtgatgtcgttttgaacatagccgtcttcgtcaagaatgccatcctgcccgtgggtggtgaacgggtccaacgccacgtcggtgatcaccccaagctgcggaaaacgctcgcgcagggcacgggtagcacgctgggcgatcccgtccgggttccaggcttcggcagcatccagcgacttgagttcagacggcgtgaccgggaacagcgccaaggccggaatccccaattcaacccaacccgcggcctcttcaagcagcagatcaatgctcaaacgctccacgcccggcatcgaagccaccgcttcccgacggttttccccgtccagcacaaacaccggcaggatcagatcgtcggtcgtcagcacgttttcacgcaccagacggcgagaaaaatcatcacgacgattgcgacgcagacgggtggcggggaacaggcgattggcaggggtaaagctcacgacagactcctgagcccgggtttacgggcgagcgttgcagttataagcggccattatgacgaaggtatgacagttgtgcttaaggatgcgacctgtagtcgcattcggcatttctgtaggaattgttcacttcgtgacacatctcgatactttcatgaatcttcatgaaggcgtaggctgcgcgttcatttcgccagcaccccagaccatgcttcaacaattcctgcatgacttcggctactttgcgctcttcctgggcaccttctttgaaggcgagaccattctggttctcgcgggcttcctggcgttccgtggatacatggatatcaacctggtggtggtcgttgcctttttcggcagctacgccggcgatcagctttggtattacatgggccgcagacacggccgcaagctgttggcgcgcaagccacgctggcaattgatgggcgacaaggccctggagcacatccgcaagcacccggatatctgggtactgagctttcgcttcgtatacgggttgcgcaccgtcatgcccgtggcgatcggcctgtccggctacccgccgttgcgctacctgatcctcaacggcattggcgctgcgatctgggctttggctttgggcgctgcggcctatcacttcggcgcggtgctggaaggtatgttgggcagcatcaagaaatacgagctgtgggtattgggtgccttactgatactgggcttcggcctgtggctgcgccgccgcatcaagaatgcgcgcattgcccgtgaagcctgtgccgacgccaaggcccggctcgcggcagagccggtcccggtcgagccgcctaagacgccagtcgagtaagccggcttctgcagcagtagaggccaatcacactcagcaagctatagctcagcaggcccagccagcccaggttgctggccggccataacccgaccaacggtgccagccacaccagcggcacattcagcaccagccgcgaaagctcggccttccacgcccacggccggttctccagcgccactcctaaggtaaacaggcccagtgccatggcactccaacccaggatcagtgccgccgtgggcataccctcgccaaaattcatcagatagctgccaaagcccacatacgccgcaaattgcagggcgatatagacctgttgacgcacatccagcgacacgtcgaatttacggaactggctcaggtcatgcttgaccatcgggtacttggccttcacgtccgccgggcgccagccggtgcgcatgaaccagatgcgcagcttgtcccaccagcgctcggtgcgccgcgcatcactccacaactgggcatagaactgcaggttggcccacagcgggttccaactggccaacggtgtggtcacgccgaaaatcaccggttcgttgtcgtcttcctcctggaaggtgccgaacagccggtcccaaataatgaacacaccgccgtagttacgatccatgtagagagcgttctgcgcatggtgagcccgatgattggatggcgtgacaaaaaaccactcgtaccagccgagcttcggcacgtgccgggtgtgcacccagaattgatagagcaaattaagcgatgccacgctgataaataccaccaatggcacgccgagtacggccaggggcaggtagaaaatccagctcagcaggaagccggtactggtttggcgcaaggctgtgctgaggttgtagtcctcactctggtgatgcaccgagtgcgcggcccacaggatgttgcgttcatggcccatgcgatgcagccagtaatagcagaagtcgtagaacacgaaagcgaacacccaggtccagacgctctgggcaggcagttcgatgacggcgagatgcttgagggcgaacgcgtaggtcaaaatccccacgcctttggtcagcagccccgtggtggtggacagcaccccggtgctgaggctgttgatagcatccgccacccggtagttgcgctggccgcgccagcgatcggcgagcagctctaccacgatcaaggcgatgaaaaacggtaccgcgtaaggcacgaagtccatggtctggtccggtctatttttgttacatcaagattaggtgcagcggcgtgagatcccattggcaacagatgacaaattagtagacatttaacgccaagaccccaggagaaatgcccatgagcaaaaagattgcagtgatcctttccggctgcggcgtgtacgacggcgcagagatccacgaaagcgtgatcaccctgctgcgcctggaccagcgtggcgctcaggtccaatgctttgccccggatattgcgcaactgcatgtgatcaaccacctcaccggcgaagagatgcccgagtctcgcaacgtgctggtggagtcggcgcggatcgcccggggtgacgtgaaagatatccgcgaagccaacgccggcgacttcgatgcgctgatcgtgcccggtgggtttggcgcggcgaaaaacctctcgaactttgccgtggagggtgctggctgcagcgtcaacccgcaggtgctggaactggccgaagcctttgccgaagcgggcaagccggtggggctgatctgcatctcaccggccctggcggctaagatctacggccccggcgtgacctgcaccatcggcaactgcgccgacaccgctgccgcactggacaagatgggcgctacgcaccaggaatgcggggtggaagatatcgtcgaagacaaggcgcgcaaactggtgagcaccccggcctatatgctcggcaagaacatcagcgaagtcgcttcggggatcaacaaactggtggatcgggtgctggaactgactcacgagaacgactgatagcccccaactgtggcaaatcgccagttgtggtgagcgggcttgttgtggtgagcgggcttgccccgcgnnnnnnnnnnnnnnnnnnnnnnnnnnnnnnnnnnnnnnnnnnnnnnnnnnnnnnnnnnnnnnnnnnnnnnnnnnnnnnnnnnnnnncgcggggcaagcccgctcaccacaacaagcccgctcgccacaagaaaccggatcaccatagggtcaagccggacgcatcaactttgtgagaatgcggtccagcgcattggcaaacgcctgcttttccttctccccatggggcggtggcccgccgcccatctggccttgctcacgcagatcagtgaacagattgcgcacggccaaccgttcactcatgttcgccgggctgaactccttgccgcggggatcaagcgccgtgacgcccttcttcaccaggcggtcggccagcggcacatcgctgcagatcaccagctccccgggcaccgcgtgctccaccaggtagtcatccgccgcatccgggccgctgggcaccacaatcagcttcacacacgagaagctcggcttgatctgactctgaccggccaccagcaccacctcgaactggcgcttgagggcgaacctcaccacctggtccttggctgccctaggacaggcgtcggcatcgatccacacccgcatgctcaggcaaccacccggcgcttttcggccaggcggctgcggccatacagcaccacaatcgccaggatcgccaccgcctgtgcactcaacgagtacgcatcggcgtggatacccagccagtcaaagtcaaagaacgccaccggccgggtgccgaagatgccggcttcctgcagcgccttcacgccatgcccggcaaacaccaccgacagcgcacacagcaacgccgcgttgatgccgaagaacaacgccagcggcagcttcgccgaaccccgcagaatcacccacgccaggcccaccaacagcaccagcgctgtggcgccccccgccagcaccgcgttgtgcccggccgggccggcttgcagccacagggtttcgtagaacaggatcacttcgaacagctcgcggtacaccgagaagaacgccagcaccgcaaaaccgaagcgcccaccgccgcctaccaggctgctcttgatgtagtcctgccaggcggcggcgtggcggcggtcatgcatccacacgccgagccacagcaccatcacactggcaaacagcgctgtgcagccttcaagcaattcacgctgggcgccgctcacgtcgatcacatacgcggccaatgcccaggtcgccaggcccgccagcagcgccagaccccagccgacgttgacgctacgcaccgccgattgctggccggtattgcgcaggaacgcaaggatcgctgccagcaccaggatcgcttccagaccttcacgcagcaggatcagcaacccggagatgtagctcaacgaccagctcaagccatcaccgccgagcaggccggcggattcagtgagcttgcccttggcgacgtccaggcgttgctgcacctgttcaaccggcaaaccgtcctgcaacgactgccggtaggccatcaacgccttctcggtgtccttgcgcacgttggcgtcgacgttatccagcgagctttctaccagctcgaaaccttccaggtacgcagccacggacaggtcgtaggcctgctcatgatcacccttctggaacgccgccaggctcttgtccagggtggcagcggtgtagtcgagcaactgcgccgggccacgcttgacctgcggcggttgcgcacgctgggcgcggaacgtcgcggcggcggctgggccgttggcagccagcacttcattgggggtctggcgggccaggtcggcaaggttgaacggttgctcgctttttgcagccaccgggtcggcagtaaagccggcgatgtaggtggccaggtcccagcgctggcggtcgtccaactggtcggcgaaagacggcatgtcggtgccttcaacaccgaggcccagggtgttgtagatcgcgtagaggctcaggcgatccaggcgcacggcgtcacgcagattggccggtggtggcgtcatgcccacgctggccgggccgtcacccgcgccagcggtgccgtggcacaccgagcaatgctgggcatagagcggcgcgcctcgcgttggatcaggggtgatcgccggggcctgactgacttcataggccacggctagttgggcacctaactgacgggcttggcgggcgactgtcgtaccgtcctgatgggcggttacggctgctaacaattcgtcgacgcctttgaccagcgccacgcgttccgggcgctgcggcagctctgccaccagcccctgcaataccccgagaaactccagctgttcgcggtattcggattcatcgataaccttgcccgcctccaccgtcgctgggtagtcagcgccaatgtaatccagcaaatgcagggcttggggcgcgccctcggccgtcgcggccaacaggttgacgctgcacgacatcaacgccggcaatatcagccaggcgagaaaacgaaggggggcaatcatgaacgaatctcaaagggaaatacgaagtaacacattgttaagccttaaagggtttgactcaaggcgtaagtgatttgtcgttgtttgaggcgaggcattttcaggagcggactagtggcgcttttgtcgacttagtcgggcaaaaagccattgttttgccagcaatgacgcttataatgccgcgccctgttagtgcgaaagggaatttcattcctgttttttataaggaatgaccacatcagttgatactttcagggaagaagtctgcatggcatttcgcgccttaccttcgctcgcgctcgtggcggtgaccttgctgtccggttgttcgatgttccgcagctacgacacggaactgcaagccaccaaccagcaactggccaccggcaatgtcgatgcagccctgacactgctggaaaagaacaacaccggcgacgacaaggacttgctctatttcttcgagaagggcgagttgctgcgtgccaagggtgatttgaccggcagccagaccgcctggcgcagcgccgacctgcaagtctacaagtgggaagagtcggtcaagttcgacagcgcaaaatacctcgcccagttcggcagtttcctggccaacgacaaggtgcgtcgctacgaaggctatgactacgaaaaggtcatgctgaccacccagatggcgctgaacctgctggccctgaacgacttcgacggtgcgcgcaccgaaatcaagaagacccacgaacgcgaagcggtgatcgccgacctgcgcgacaaggaatacctcaagcgtgaggacgaagcccagcgcgaaggcgtaaccacccagatgaaagacctgcgcggctacccagtagaagccctcgacgcaccggaagtggtcggcctgaaaaacagctaccagagtgcgttcagccattacctggcgggcttcgtctatgaagcactgggcgaaaaagacctggccgcgcccggctatcgcaaggctgccgaattacgccccaataccccgctgctggaacaggccctgctggacctggacaaatccagggtcggcgccgatgaaaccgacgtgctgatcgtggtgcaaagcggcctggcaccggcccgcgactcgattcgtctgccgctgccgatcccgatcaatggcaacctggtgatcaccccgctgtcgttcccggtgatcaaggcagatacatccaccgccacgtttgcccagatcggcgtcgacggccagcaacagaacctcaccgcactcaacagcaccacggccatgtctcgccgcgccctgcgcgatgacatgccagggatcatcctgcgcaccaccgtgcgggcggtcacccgtggcgtggcgcagaacaacctgaacaagaccaacccgatggccggcctggtgctgggtattgcttcggccgtcaccgaaggtgccgacacccgcacctggcgcaccctgccggacatgacccaggtgacccgcctgcgcctcaagcacggcgagcaccaggtcagcctgcccaacgccctgggtggcacgctggtgacggtcaaggccgaccagcgctatcaggtgatcaccctgcgcgtggtcggcaaccaggtattcgccggtggcctggccgcccatgtggtgccgagcaccgccgcccaggccatcgccctcaaacaaccttaaggagcacgctatgcgtcatttcatcctcggcgccctggcgctagtcctgctggccggctgcgccaccccgccaccgccggaacccggcagcgccgcgagcaaaatcgtggtgatgggcaagttcaagggcatcgccgtcggcgccatccgtgtggcccgcgagaacggcttcctgaccgccaaggtgcagttgagcaacatcaccagcagcaaccagatgatgtactaccgctttgcctggctgggtgccgatggcttcccggtgggcgatgaagaaacctggaaagtgctgaacctgtacgccaaccaggcgaccttcctgccggcgattgccaatttgccgcaggcggcggacttccgtcttgaagtgaaaaccccttgagccgtccttctttgctgctgagagatttccccatgtttgcacgcttctcgatccttgccgtcgtcgccatcctggccagcggttgctccaacacttcgccggtactgggcggtaagaacatcagctacggcgataccaaggccgtggaactggtgaccaacgagttcggctccaccgacctgcagatgatcgccgaaagcatgacccgctccctggcccagtccggcatcctgcaaggccgcccggtggtgcaggtgtatgacgtgaagaacaagaccagcgagtacatcgatacccgcgagatcaccacgtcgatcaagacccagctgatgaagaccggcaccgcacgcttcgccagcgacaacaccgacatgcagagccaggtcgaccagctcaagctgcagaaccagagcggcctgtacaagaagtccaccgtcagcaagaccggcaacatggtcgccgccaagtaccgcctggaaggctccatcagctccatcgtcaagcgcagctcggactacaaggacgtgttctacaaattcagcctgcaactgatcgacgtcgagagcggcctggccgaatggatggacgaaaaagaaatccgcaagaccacggagcgctaagcaatgcgtgcatggatcggcatgatcggcctgctgtgcgccttcggcgcctcggccgccccgaagatcgcggtgactgacctggcctacgaggcgcgggtcgaggaatacattcaccaggtgtcggcaagcaacaacttccaggccagcgcctaccacgccagcggtacgtcgaactacagcgagtacgaaagccgcaccagctacatcgaacagaccgagctgcgtaaattcagcggggatatcaagggcgagatcctcaagtcccaccagttccagctggtacagggcacgccctacaccgccgatgccaagggtgacgtctacgacgtgatcaagcgcatcaaggccggccacttcaagggtgcggactatgtgctgtttggcacgctgtcggatatcgacttcacccaggacatcaacgccctggaccagaccaacagctactcggcggtgctgggcctgacgctggtggcggatttcagcctgatcaatacacgcacctacgagatcacctcggcgttcaccgccatgggtgaaggtcaggacaccaagttggtgaacaaccgcgatgtacgcgtcagcctgaaccggccgcgggtggtgaaggaagtgtcgaaagcgctgggtgaagatgtagcgcggcagttggcagagcaactgggtggtgggtatcaagacccgggcaagcctgcgttgcgcaataacctgccaagggatgaagcgccgaaaattttgcgctgacgccctattcacaaacaccgcaaaactattgtgggagggggcttgcccccgatagcggtgggtcaactacaagttagctgactgacacaccgccatcgggggcaagccccctcccccattttttaatccggttgtgtcagttatgccgtggcacggtgcaggctggcgaggaagcccgcagccccaacgaacaaccccgcaaacgtacgattcatccgcttctgctgcttaggcgtacgcaacagacgcaacaccttcgacgccagccccgtataccccgccatcaccaccatatcgacacagatcatcgtcgcacccaggatcaggtactggatcagcagcggcgcctgcgggttcacgaactgcggcagcaccgccagcatgaacaccagggccttggggttgctggcgttgaccaggaagccacggaacatcatcgccatcggcttgccgatcgggcgcacggccgcgtcatcggtcatgtccatgggcaaggcacgccattgcttgatggccaggtacaccaggtacgccacgccaaaccatttgatcgcatagaacgccgtggacgacgtcgccagaatggcacccaggccgcacgcgaccacggcaatctgcattgccaggcccagttgcaggccgatggcattccagtaaccgcgcaggaaaccgtattgcaggccgctggacatcgaggcgatggcgccagcgccaggggaaagggagatgatccaactggccaggaaaaaggccagccacgtatcgagtgccattacacacctcaggagggagtttgctgttgtgccttaagctaactccgccgaccaaaggatggctatagatttttacaggatgtgaatgctagcggtcgcccggaaagacatgggtacccggccaacggcgcaccgagcgctggaagaacaggctgttaggcacctgcaccatcgcgctgtcggtaccggcctcggccacttcgaccagcgtggtgtagagcaggttgatcgccacgacccggcccttcacgcccggtttgtcgacggtgtccaccagttcgacgatatcacccaggcggaacggcccgacggtgaagatcagaatggcgcagagcaggttggacaacaccgaccacatggcgaagaacgccaccgcggcgaccgcaacaaaccccgacagcgccgtccacaacaccgtggcggacacgcccaggcgccccagcacaaagatcagcgcactgcccatgatcaaccagcgcaagccgccacgcagcggcatcagcagttgcggtgggaacgggtagcgctcgcccaggcgagtcaggcctttggcgacaaagcgctgggcgaggtagccggccagcaggatcagcaggatttgcacgccgacccatacgggttcgacccactgcgtcgggatcggcagttgcaacgcttccatcaggacagcgcctccagctgcgcttgcagggtttccagcagttcgagggcttccatccaggtttcctccaattgcccttcgcgtaccttgagcttggcctgctcagccagcaggtcgcgcaattcatccttgcgggccgcctcgtagacggcgctgtcgcccaggctggcttcgatcttggccaggcgctcgtgcaccttgcccagctcggcttccagcttgtcggcttcacgcttgtgcggcgccaactgctgacgcaatgcggcggcagcctggcgctgggctttcttgtcggtcttgtccgggttgaccggggtgttgctgaccggcgcgttgcgcaggcggtaatccgtcagccagcgcgcgtagtcatccaggtcgccgtcgaactcttcgactttaccgtcagccaccagcaggaagttatccgtggtgctcttgagcaaatggcgatcgtgagataccaccaataccgcaccactgaattcctgcaaggccatggtcaacgccagacgcatttccaggtcgaggtggttggtcggttcgtcgagcagcagcaggttcggacggtcccaggcgatcaacgccagggccaggcgggctttttcgccgccggagaagttcagcaccggctcgtcgatacgcgcgccacggaagtcgaaaccaccgaggaagtcgcgcagggtctgttcgcgctcggtcggcgccaggcgctgcaggtgcagcaacgggctggccttggagtccagcgagtccagctgatgctgggcgaagtaacccaccaccgtgttctcgccacgggtcaggcgcccagccagtggcgacagctcgcccgacaggttcttgatcagcgtcgacttgcccgcgccgttggggccgagcaagccgatacgtgcacccggcgttagctgcagcttcactttttccaggatggtcttgtcgccatagcccaggcgcgcatcggaaagatccagcaacgggctggagatcttcaccgactcacggaacacgaaatcgaacggtgagtcgacgtgggccgccgacagctcttccatgcgctcaagggccttgatccggctctgggcctggcgggccttggtggcctgggccttgaatcgggcgatgtagctttccatgtgcgcacgttgcgcctgctgcttctcgtaggcctgttgttgctgggccaggcgttcggcgcgggcgcgttcgaacgcggtgtagccgccacggtagagggtgattttcttctgttcgacgtgggcgatgttatcgaccacggcgtcgaggaaatcccggtcgtgggaaatcagcagcaaagtaccctgatagttcttgaggaagtcttccagccacaggatcgcatcgaggtccaagtggttggtcggttcgtcgagcagcaacaggtcagacgggcacatcaacgcttgagccaggttcaggcgcatgcgccagccgccggagaagtcggcgaccgggcggtccatctgttcgttggtaaagcccaggccggcgagcattttgcgcgcgcgggcgtcagccgtgtagccgtcggcgctgtcgagttccgagtgcaggcgcgcctgtgcggcgccgtcctgggctttctcggcctcggccaggtcgtgttgcacctgacgcaggcgcaggtcgccgtcgagcacgtagtcgatcgcgatgcggtccagggtgtcgatctcctggcgcatatgggcgatgcgccagtcggccggcagcaagcagtccccggaatccggggtcagctcacccagcaacagggcgaacaacgtggatttgccggcgccgttggcaccgatcaggccggctttgtgaccggcgtgcagggtcagctcggcgtcttcgagaagacgttgcgggccacgctgtaatgttaggctttgaagtcggatcataatggcggcggagtctaccagcttcgttggccgctggcttgggtgtgaatatgtgcgctgacctgtggagctttgccctttcgacttacgcccgctcagggtgcgaggccgcttgcctgcgcttgcaggagcaaggtgcggacgtgtgcctgctgctgtgtggtgcgtggctggagcagcgcgcggtgacagcgaccgctgaacgtatgcaggcactcaaacaaatcgccagaccctggcaggcacaggtgattgcaccgttacgacaggtgcgcatgcaatggcgcgccatggcgcagcaggatgaggatatggcggggttacgcgaacgggtcaaggccctggagctggacgccgaacggcagttgctggcacgcctggaagcgttggcacaaacgtggccgactggcgatgcgggggaccggctagggtggctggaaggactggcggctgaggatgccgccaaccttgaccacgacgcgctgcatcagctgcgcgtcgtggccaccagcacttaggaagcgctggttggagtggcgcttggcgctaccggggcaggcgtgctgctggccggagcagttggagcggtggatgcagccggggcggcagcaggagttgctggcttggcagcagccggtttggcggctggcttagcggctggtttcgcagcagcaggtttagccgctggcttagcggctggtttcgcagcagcaggtttagccgctggcttggcggctggttttgcagcaacaggtttagccgctggcttggcggctggtttcgcagcagcaggtttagccgctggcttggcggctggtttcgcagcaacagttttagcaactggcttggcggctggctttgcagcagcggttttagcagctggcttggcggctggctttgcagcagcggttttagcagctggcttggcggctggtttcgcagcagcaggtttagccgctggcttggcggctggtttcgcagcagcggttttagcaactggcttggcagctggttttgcagcagcggttttagcagctggcttggcggctggttttgcagcagcggttttagcagctggcttggcggctggttttgcagcagcggttttagcagctggcttggcggctggttttgcagcagcggttttagcagctggcttggcggctggctttgcagcagcaggttttgctacggctttagcgggtgccttggcagcaacagctttgctcgccggcttcttcgccgcgctcgctgcaacagctttggctggggtgcgagcgcccaacaccttagccacggcttccttcacacgaccaacgccctgggccagtttcaggctttcctgagcatcttttttcagttgggaaatgtaggcgcgggtttcagcttggcgatccttgagggcgtccagcagatcctcaagttctttgacagcgtctttggctttggcttgtgccttggccttgccggcagtagcggcgtcttgcagtttggtgcgggatttgtgcagcttttcttgcgctttaccgcgttgtttttccagcttggcgagcagtttttctgcatctgccaacgcttgggaacaggcgctttccagatgttcgagcaagctgcccgagagttgttggagtaaatgcaacggggtattaacaggcttctgtttggccgacatggtttacctcctggctgacgtgggtgcggctcatactagccctctgctcttaccgccgctagggcatgttgacagtatcgtttgccttgcgttgcaccgtgagaaaattcttatcgatataacgaaaatacgcggcacttttgacgtcaccacactggcataatccgttgcactttcggcgggaggatgcccatgtcgcgttacctttttcttgtgctcggcctggcaatttcggtggccaatgcgagcgaacaatcgccggtaaaaaaccctgggcagaaccagcacgacctcgcctacagcctgggcgccagcctcggtgaacgcttgcgccaggaggttcccgacctgcagatccaggcgctgatcgacggcctcaagcaagcctatcaaggcaaacccctggcgctggacaacgcacgcatcgaacagattctggcccagcacgaagcacaaaacgaagctgatgcgcaggcacctcaaagcgaaaaagcgctcgcggccgaacaacaattcctgagcaaagaaaaagccgcaaaaggtgtgcgcgaattggcggatggcgtcctgctcaccgaactcaccccaggcactggcgacaagccgagggccagcgaccaggttcaagtgaagtacgtgggacggctacccgatgggacagtgttcgaccagagcgcgcaacctcaatggtttcgcctggacagtgtgatcagcggttggagcagcgcgttgcaacagatgccggtgggcgccaaatggcgcctggtgattccatcagcccaggcctatggcgccgacggtgccggcgaattgattccgccctatacacccctggtgttcgagatcgaattgctcggtacccgacactgaggcaataaaaaacggtgcgccatgcgcaccgtttttttgtaccgccgtcgtggatcaagcttgagtagcagactcttccttgtgggcgttgtgcagcacttcgatcaagcagtcttcgagttcgaatcgctcgtgaagcaacgcgcccaattctttgaatttatccgccacgcagttaccggcatcacacaggtcggtgaactccagcagcttctcggtgatgacatcgatacgcgggtagatggtctccgccaagtccaggccacgctgatcgtcgaaggcctccgcctccttggtcagttgctcgtagacaccgaaatggccggctgacacgtagtcaaccaacacaccacaaaagtcctgcaacggttcacggttctcggccagtgcttcaggcttggcgccaagagcatcaaaggcccgaaccagttcgtgacgtgccttcaaccagctgtcgatcagcttgtgcaccccaccccagcgttcctgagcattctgacaactttccagcatgatgatctctcttccctaataggggcgctgccgcctggtgcccgcgcaacacttcaaggataaagcagcagccggacaaggccgcatctgacaaacggtttcaacaacacgtgcgggccagattatgcccgcatgactatggcttcaaggtacgcaggagagaaagttcatacaagtgtttaatcccgccctacaaactgcgacccgatatcagcgcctcgccagacgcaaacgttggctcaaaaacagctgtgaaaattgcatgacgcccagtatcaacatcccaatgaagaacagcaggctccactccggcaggctcaagtcaaacagcgtccagttgatctcaacgcagtcgacggtgcctttgacagtcaattgcagagcctgccaaaacgacaggttttcgatcatgtaatgcaggctgggccagcaatcagccgactgtcccggtgcggcgttttgcagcagtacttggcgtatggcggtaatggcacccagcagtgcgaagcccatgctcgccagcccatacaggtagataaccaagcgcttggggtgatggagggcggcgaccagattgaccaatgtgaaaccggccaggaaaccccgttgcatctggcacagaaagcaaggacgcaacgagaccccgaactcgaggtaaaacgaggcgcccaatgtcagcgcacccgccaggaacgcaaggacatacaaggagcgtgaaggggccaaagacatgctttatccgcatcgcgaaagataggtcgctacggtagaggaaaggcctgaccgctttcaatacatgctggagcagacgattccgcgagagagtaaggagatcccgccagaagatggaagactttggacaacagagtgtcggactttgcccacaatcgcgctgatagccgctttctgaggtcctgagggattggctgccagaactatccgagccaaccctcgcctgtcttcctacctcaaacccgcgccgggacgggcagcggtgaagccagcaaacggttatccagcaaccccagcccttcctggaacaattggttactgcgctcggtgtcacccagttgggccaacaagcgcgccagctcggcgcaggcctcagggttgcgctgcacctgcaggctgctttccagataatcccgcgccttgccccacaaactgttttgcaggcacagacggcccaacgtcagcagcaggctggcatcgccaggatgatccttcagccaaccttcggcaaacttcagctgccgagccggatcgctgccacgcaacagaccgtacagccggatcaggtggctgtcgtaaccacgcttgatcgcgccacgcaatgcttcctcagccttggcgtcggcacccagttggcgcaattgctcggcgtaagccaggaccaattgcggctcctgacgctgtgcggaggtgagttgttgccaagcccgttcaagggactgcaagccggcctcgccctgttcttcgcgttgggctgcaaggctgaggttctcgccccacgcacgacgctcaagctcggccagttcactggcgggcaagactttatccttgcgcaattccggcaacaggcggatcaccgatgaccagtcgccccgctgctgatgcaagcgctgcaattggcgcagcacctgcgcattatggggatggcgctcgtgcatcgcttgcaaggtggtcagcgcaccctctgtatcaccacggtccagttgcagctgggcatggctcaaggcaaccgccagctcggcctggggctgacgctccagggcacgctccagcaaaccatcagactcttcgtagcgcccctgttcattggcagcacgggctgcgccgaggtagtacagcagcggctgacgctcggcttcggcagcgcggtgcaggtgacgctcggcgctggcccagcggccttcggcgaggtccatctggcctagttcgatggcgatctgcacgcggcggctgcggttgcgccgtgaccacgggttgaccacgccaccggaagtggtgaccaggctcagcagcacgcggatcagatagatcgtcaaacccatggcaaacaccgccaccacggtcgcccacaggctcgactcgtaatgcagcacgtgcggataggtgaccagcacgtagccagtgtgtttcgaaatgcccaccgccagcgccagcgcgatggcaatcgccagcaccaggatcacatagaaacgtttcatcggctctactcctgcttcgccggcgtcgccgccgccttggcttcgtcggcagacagatgacgccgctcaaggtacgcctgcacagccgccaggctcgcagccaggtccggcgtcactaccgacaccgccttgggctcaagctcggcgatacgtgccagcatcgccttgctctgcgggttgtcctggttgaagttgtcctgcaagacgctgcgcgcttcgcccaaggagcggctgtagaccgccgactcaccattgagcgcagcccattgtgcttgctccagggccaggctcagggccaggcgcacctggttcaagccttggccggccagcagcggacgaatgttgtcgtccgggttgaagtcgatgcggaagtagcgggaaatctgctcccaccattggctccagcggctttcggtgtccgaggtcgggcgtccttgggaagccggctcggtcaactgatattcaggggcgatggccgccaactgcacgacctggtcgcgcaaggccgccagttgcaggtacagcccggtgcggtccggctggtcggtgctgcgcagcgcggcaaggctcttagccaattgttcgcgggcagcgtaggagccagggtcgctttgttcgcgaagaatctcgtcggcaccctgcaccaatgcctgggcgctgttgatatcttgaagggcagaaaggcgcaggctcgccaggcgaatcaagtgttcggcctcggccaggcgccagtccttacggctggcgcccagcacggtttccaggcgctggctcaggcgttgctggtcgccctgcaactgggccaccaggcgacggcgctcctccagctcatccgcacctggcaactgcgccaggcgcgccgccagttgttgctggctttgcttgagggactgggactggtcatcgagggtctgcacctggcccaactgctgttggctgctggcctgcagggcgcggacctgccaaatcccccaaccgccggcggcaacaccggcggcgccgagcagcagggcgatgattgccaggccattgccacggcgcggcgcggtgaccggtgactcaaccggcgcatcaagcgcgggctgggcttcatctttaggcaaggctgtttcgctcacgtatccgtcctttgcgtttcagagagtgggaacggtatagctccgtatcgccactaacaaagccgcggcactcgcaccacgacaatccacaactttttctgcaccggcggcccgcgccatctcctggactcgcgggctcggcacgaacaacggtagctgtgccacttggggccaatcggctccggccagggcttgcaggtgtaaaaaaccctgcccactgctgaccaccaggccgttcaagcgttccaactggatgcgttgcatcagtaccccggcgtcgtaggccggcaggaaacggcgatacaactccaggtagtcgacactagcaccttgctcacgcaaacgctccgccagcagctcacgccccccctcgcctcgcaggatcaagacctgggcatcagggcgtgcgatagcctcgcgcaacgcaggcaattgaagcaaggcctcgctgtcgtcgccagtggggggatagtgaacgttgaggccgtgatcagccaatacctgcgcggtggcggcgccgacactgaaccatggcaactgcggccatgcgcgatccagctgcgcgaccgcaagtcgcgccgccggcttgcttactacgatcaccgcgcagtagcggctcaggtcatggaagacagcctgctgttcaggagtgacaggcagcggttcaatatccagcaacggcaagctgctgctgaaaacccccgcatcggacaacgtggccgccagggccatcgattcctcggcaggccgcgtcagcagcacacgccattcggtcactgcgggccggcctcgccgtagactttttgcagaatggcaccggcgcccttctccagcagcgcttcagccacctggataccgagggccgtggcatcccgttgcgggccacggacctcggcggccagcagggtgccgccttccggatcacccaccaggccacgcaaccacaggttttcaccttcgagcacggcgtagcaggcgatcggcacctggcaaccaccattaaggtgcttgttcagggcgcgctcggccgtgacgcgcacttcggtatcgtggtgatcgaggggtttgagcagggtatggatttcgctgtcggcggtgcggcattcgatacccacggcgccttgtccaccagcgggaaggctatcctcgacgctaatggctgaggtgatacggtcttcaaagcccaggcggatcaagccggcggcggcgagaatgatcgcgtcatattcaccggcgtccagcttcgccaggcgggtgttgacgttgccgcgcaggaagcgaatctgcaggtccgggcggcgagtcagcagctgtgcctggcggcgcaggctcgacgtaccgacgatgctgcccaggggcaactcatccaacgatgcatacgtgttggaaacgaaggcgtcacgcgggtcttcacgctcacagatgcaaaacaggcccaggccttcgggaaagtccatgggtacgtctttcatcgaatgcacggcgatgtcggcttcattttccagcagcgcggtttccagttccttgacgaacaggcccttgccgccgatcttcgacagtggcgagtcgagcagcttgtcgccgcgactgaccatgggcaccagggacaccttcaggccagggtgggcctgctccaggcgtgctttgacgtattcggcctgccacaaggccagggcgcttttacgggtggcgatgcggatttcgcgagaggacatggatcaatccgtactgaatagatacggcagataataacagctcaggcaaatacgctttgatttgaatcagcaagtgcggggcctccctggccacgtcgcaccgggatatggaatgcaggcctcgctacagcccgtgggctaaagctgctgcatcatcttgcgcacaccggccacatgccgtcggctgacgatcaacgcgtcgccgttaaggcctttgaggaatagctggaaatgccccaggggcgtgcgctgcaaccgttcgatgcgctcacgggccaccagcgcgttgcggtggatacgcacgaagcggtcgccgaattcatcctcaagcgccttgagcggttcatcgagcaacacttcgccgccctggtgacgcagcgtcacgtacttgtgatcggcaataaaatagaccacttcacccagcgggataagttcgatgcctttgcgggtacgggcgctgatatgactgcgtggcccgttaccactttgggcggcaggctgagtcagggcggcaagctggacgcgcgttgggcgctcagcctttttgagggccttgagcaaggcgtcacccaccaccggtttggtgaggaagctgacaccgctggcttccagcgtttccgcggaaaactcttcaccggctgcgcaaaacaccacggcaggtggcgactctcgttcgctcaatcgagccgcaacttgcaagccatcgaggcccggcatacggatatcgagcaacaccacatccggcttgaggctgtcgatcagcgtcaacgcctcttcgcccgtggtggcgctcggttctaatactgcgtaaccctcgagctcactgaccagacggctcagtcgctcgcgggcttggggttcgtcatcaacgatcaggacattcatattgcgctggattcctgcgtgagtctcgcacaaggatagcgtagacaggtgcggtgacttgcgtcacagcgatccacgctaagactagcgcgagcggcaaaaagtgccctgagagtggcacccatatttacccggacctgttcaatagcgcccaagacctgctgccttcgggcatcgtcgtagggtttgctgatacacaatccgaatacccccctttttttaatggatagtctgggctctgaccgcattacccgactttggtgcattcacacactatcagtccaactgtagacgctcgctgagacgacattgctcaatcgtcaaatatcgtttcaataaagccccttcgctcagtctcgtcctggacgcggtcggcggcaaggcacttagccatcctttgcacaaataaaaatgccgacgacccgcggcaccgcgtccacgggcaaccctgttattatcgccggcacacttccatgcctcttattaagcagatcacgagcgaatccatgagcaccgacaagaccaaccagtcctggggcggccgcttcagtgaacccgtcgacgccttcgtcgcccgcttcaccgcctccgtcaccttcgaccagcgcctgtaccgccacgacatcatgggctccatcgcccacgcgacgatgctggccaaggtcggcgtgctgaccgatgccgagcgcgatagcatcatcgacggcctgaccaccatccgtggcgagatcgaagccggcacgttcgactggcgcgtcgacctggaagacgtgcacatgaacatcgaggcccgcctcaccgaccgcatcggtgtgaccggcaaaaagctgcacaccggccgtagccgtaatgaccaggtggccaccgatatccgcctgtggttgcgtgacgagatcgacctgatcctgtccgaaatcacccgcctgcagaaaggtttgctggagcaggccgagcgtgaatcggacaccatcatgccgggcttcactcacctgcagaccgcgcaaccggtgaccttcggccaccatctgctggcctggttcgaaatgctcagccgcgactacgagcgcctggtggactgccgcaagcgtgccaaccgcatgcctctgggcagcgccgctctggccggcaccacttacccgatcgaccgcgagtacaccgcacaattgctgggcttcgacgccgttggcggcaactcgctggacggcgtgtcggaccgtgacttcgccatcgaattctgtgccgccgccagtattgcgatgatgcacctgtcgcgcttctccgaagagctggtgctgtggaccagcgcgcaattccagttcatcgacctgccggaccgcttctgcaccggcagctcgatcatgccgcaaaagaaaaaccccgacgtgcccgaactggtgcgtggcaagagcggccgcgtgttcggcgccttgatgggcctgctgaccctgatgaaaggtcaacccctggcctacaacaaggacaaccaggaagacaaggagccgctgttcgacgccgccgacaccctgcgagactcgctgcgcgcgtttgccgacatgatcccggcgatcaagcccaagcacgcgatcatgcgtgaagcggcgctgcgcgggttctctaccgcaaccgacctggcggactatctggtgcgccgtggcctgccgttccgcgattgccacgaaatcgtcggccatgctgtgaagtacggcgtggacaccggcaaggacctggcggaaatgagcctggaggaactgcgccagttcagcgaccagatcgaacaggacgtgtttgccgtgctgaccctggaaggttcggtgaatgctcgtaaccacgtgggcgggactgcgccggcgcaggtcaaggcagccgtcgtacgcggccaggctttactgtctagccgctgaaaaatgtgggagggggcttgcccccgatagcggtgggccagccagcacatgtgttgcctgacactctgctatcgggggcaagccccctcccacacttgatcactttttggctgcgatcatcgccacaaacgccggcatcgccgcctccctgtccgccgccaccttctgtgcgttgggcatggcatgcaaccgctccagcaacgccttggccgccggcatgtcagccagaaaatccaggccaaacagcttctcgcccaccgcacaggcgaggttcacgctgtacatgaagtacaaatccgcaatcgtgaagctttcccccgccacatacggcgcgaacttgccgtgcctgctcagcgcaccgacccccagtagcaactcggacctggacttctccttgatcgcctccggcaccggcatgcccataaacgcttcggcgtaacacgcgcgggccggcagctcgatgtacaactcgatctccctgcacagcgccagcacctgggctcgctggaacggctcggcgggcagcagcgaaggcccttcctgggtctgttcgatgtattcgaggatcacgctggtttcgttgataaacccctgcttgacgccgaggaccggcaccttgccacgtgggctgaccgcaaagacatcgggggtctgcccggagaaaaaaggcacctcttcgaaaggcagccctttctccagcagcgccagcttgaccatgttgtagtagttactgaccgaaaatccgtagagcttgagcattgcaggtgcctccaggccgggaatggggttggctgcaagggttatagccccgagggcccggccttgccagcagcatcagccgcctgaatgggggtagactggcgccctttccttgaggagcctgccatgagcgagcctaccgatatcgacaacgacgaagaagaattcgccgaaaccaccctgatcgaagcgatcgaaaaccagatcgaaagcgaaaacccaccggcggccaaagccacgttcaacaagctgaccctggtgggttacgaacgtgaagagattctgcaactgatggcccacgtgctggctgtcgaaatcgatgcgctgctggaagaagaccgcgccttcaataccgaatggtatgaaactgcactgcgcgccctgccagaactgcctccggaaaagcaataatccaggggcgcagcaacacgctggacagttcggcaaagtgcgttcaccttatggcctgctagcctctaataaattcttagaaagtctggagtccttatgtcgtatacccctgagttggttgccgaactggaaatccttgtgctcttcccattggacagcaccaaggaaggtctgaaagttcaccagaccgctgcgcccactgccatcgccgctgccatgcgcctgcacgcgaaaggacttatcgaccaaccggacgggggctacctgaccagccttggccgggacgctgcagaacaagcccagaccctgctgactatcttgaccaccgccaccaccaaagaagccgcctgatacctgacaccgcccatggagtccgccccgtgcggattccgagggcgttgccgtgcacgcgcaaaaaatctgacgtcaaaaaccatttctctctaaacctcctacgctactggctgtaaactcctacacggctgcccacgtcgggccctgcgagccaccgacctcgacatgacccgcacccatgaaatccgccccgacctggacgaaggcatcgaccgcaaggtgctggcccaattgcgtgcgcgtttcatggccctcaacgaaggccgcatggcccgggctgtcgaagggctgacaccgcgccagcaaagcgtgctgaccttgttgccgctgttcttccacgtcaatcacccgctgctgcctggctatgtgtcgggcagtacaccggccggcctctcgaatttcgagcccgacgcccaggcgttgaccgaagcccagcgcctgacccgctcgttctcctacaagccacgccacggcaacccaccacggccaatccacggcctgttcctcatgggtagccttggcaccctggcccaggccgaccagagcgacatggacgtgtgggtgtgtcacgcccccgatctcggcgaaaacgaactggccgaactgcgcaagaaatgccaactgctggaagcctgggccttgaccatgggcgccgaggcacacttcttcctgatcgagccgacacgcttcgtgctcggtgagcgcgacacccaactgagttccgacgattgcggcaccacccagcattacctgctgctggacgagttctaccgcaccgccatctggctggccgggcgtacgccgatctggtggctggtgccggtgtatgaagaaactcgttatgccgagttcacccacacgctgatttccaagcgctttatccgcgccgacgaaaccctggaccttggtcacctggcgcgcatccccccgggcgagttcatcggcgccgggctgtggcaactattcaagggcatcgagtcgccctacaagtcggtgctcaagctgctgctgaccgaggtctacgccagcgagcacccgaacgtgcactgcctgagcctgcgtttcaagcgggcggtattcgccaaccagatggatctggatgagctggacccgtacatcgtggtgtaccgccgcatcgaggaatacctcaaggcccgcaacgagcccgagcgcctggaactggtgcggcgcgcgctgtacctgaaggtcaaccgcaaactcagcgccggccagcgcagcaccagctggcaacgcctactgctggagcgcctggcccatgaatggggctgggaccagcgccaactgacactgctggacagtcgcagccagtggaaagtacgccaggtcgcctccgagcgccgcgcactggtcaacgagctcaattacagctatcgcttcctgacccagttcgcccgcaccgaacagaccgtcagcctgatcaacaagcgcgacctcaatgtgctgggccggcgcctgtacgccgcctttgaacgcaaggccggcaaagtcgagttcatcaaccccggcatcgccccggacttggccgaagacaccctgaccctggtgcaatcacccaatcgcaaggagccgggccagcaccactggggcctgtacaacggcaacctgacagccctggagtgggagcacttcgcgccgatcaagcgcagccgcgacctgctggagatgctcacctggtgccatcgcaacggcgtgatcgacagcagcacccgcctggccctgcaccccggcaccagcgacatgaccgagttcgagctgttcaacctgctgggcagcctgcaacagagcatcgccctgcccctggccagcgtcgatgaagagcgcctgctgcgctcggcagtacccgaggaagtgctgctactgatcaacgtcggcgtcgacccgctcaagcaccaccgcgacctgaacatcctgatgaccaccgagcgcaccgactccctgagctatgccggggtgcgcgacaacctcgtgctgaccctggaccaagtcacgctcaatagctggaacgaggtgatggtcagccgctacgacggccctcacgccctgctcgactgcctgcgcgactacctcaaccagttgccggcagaccatctgccacggctgcgggtgcgctgcttctgtcacaaccgtgcgcagttcattgcccagcgcgtggaagaaatcttcgacaccgcgcagaacctgctgctgggccagggcaatcatcgttacctgctccaggtgcagcagcactatcacgtgatggagttgataccgggccaggccactcacgtgtcactgccgacccaggaggcgctgatcgcctacctcagcgaagaactggccagctacagcccgctgcacctggacgccatggcactggaagaccatgacctggcgctgctgctgccgatgggcctggccgattgtgtgcaggtgttttaccgggtcaacgagggcttcgccgagctgtatgtgctggatgagttcaacgcgctgtggcaacagcgcttgccgttccatgacgaacagagcctgctggcgccgttgcagcgtttcttgcagtcgatcatttatcgccgcgacgcgctgtcaccgctggacccgcatgagccactgggcgcagtgcaaaccttgtattaccaactgttgccgtcgggcagcggtcgcgcgcgcggcatcgagcctcgtcctgcgccgttgaacccggcgaacaaaccgttctatgacgtgcaggcgattatcggcaaggcagcgctgggccaggtggggatcaccctgtactgcaatcagcgggagttttccgagctggaatttggcgaccagttgtttgcggtggtcgcccaggaaatcgtcgggcaacgccgggagcccgaacgttaccgctgctacatcaccgacctcgacctgtccggcctgctcggtgatgtgcaaagcccaagcaacctgtacctgcggtacaaggccgagctggaactgtcgctcaacgaggcgctgggccagatttaaagggggaaggcaccgccgtctttaggctggccttcaacactgagcaattccagcttgagcgtcttgccacccggggccggccagtcgatgtgctggccaacctgcagacccagcaaggcgctgcccaccggcgccaggatcgaaatcttgccttcatcggcattggcgtctttcgggtagaccagggtcaagtggtaatccttgccgctgccttgctcacggcaatgcacgctggagttcatggtcacgacacccgcaggcacttcatcgtggccaaccacttcttcggcgcggtcgagttcggcttgcaacgcttcgacgccgggagattcgtcgcccaggcggtcgatcagttgctccagacgctgcacgtcaagacgggtgaggatgatggacggtgcggtggtcatgattcaggcagactccttttttctgcacaaaaaagcaaaaccccgccaggaaaggcggggttctcacgggcctcgatgagttgaggcgtatccggacactaccacagcgtcacaaataaacaagacagcctcaggcgtgggcccggcgctgctcggcctcggcgcagatgatccggcgccgtgcatcgtcggcagagcgccattcacggatgtcttccacatggcggaagcagccgaggcagactttctgctcatccaggcgacacaaactgatacaaggtgacggcaccgccgggctgacattactgaacagtggcttgggcggacgtacggttgcagactgggtcacgatcaaatctcgtcgaagtccagcgcttcgccggtatattcctcgaccaggcgcgcgagcatttcacccaacagctcctcacttttgtcgcactgccatttgccgctttcttcgtcatagtcgaagtgaacgccaccggaacgtgctgcaagccacagctgacgcaaaggctcctggcggctgaagatcagttgctgaccgctctcgaacttgacggtcagcacgccagccgagttttccaggtccacgtccaggccgctgtcatcgaaaatatcttccagcgcctgctgggtcgaatccaccaggtcgtgaaaacgggcttcggtcaaactcattgtggcaacctcaaaagtgtctggttttgctcaagcgccgcacgatacgggcgagccccgccgattgcaaaggataccgattccatcgcgattggcggtacgaaatatccacggccagcgtagtccacttcgtaaccatgtcggcaaacccccgccggacgggtattccagcgcataggcaagctggcgggtggtcggtatactcgggcgcaattaatgcatattcaaggatttcgccatgaagcgcctgatctcttcccttgctgcgctcgtcgcggtcgcttgcctcgttagtgcctgtggtcaaaaaggcccgctgtacctgcctgatgacagcaaagacccgaatgaacaggcgcaatcgtcgcaaaaaccatccaaagcgcataagcacgacacctacgaataagggtactccatggacgcttttaactaccgggacggcgagctgttcgcggaaggcgtggcgttgtccgcgattgcccagcgctttggcaccccgacctatgtgtactcccgtgcgcatatcgaagcccagtaccgctcgttcaccgatgcgctcgacggcgtgccgcacctggtgtgctacgcggtcaaggccaactccaacctgggtgtactgaatgtcctggcgcgcctcggcgctggttttgacatcgtctcccgtggcgagctggaacgtgtactggcggctggcggcaaggcggacaagatcgtgttctccggcgtcggcaagacccgcgaagacatgcgccgcgccctggaagtcggcgtgcattgcttcaacatcgagtccaccgacgaacttgagcgcctgcaggtcgtggccgccgagatgggcgttcgcgcgccgatctccctgcgcgtcaacccggacgtcgacgccggcacccacccgtacatttccaccggtctcaaagagaacaagttcggcatcgccattgccgacgccgaagacgtgtacatccgcgccgcccaactgccgaacctggaagtgctgggcgtcgactgccatatcggctcgcaactgaccagcctgccaccgttcctggatgccctcgatcgcctgctggcgctgatcgaccgtctcggtgaatgcggcatctacctgcaccacatcgacctcggtggtggtgtaggcgtgcgttatcgcgacgaagagccgccgctgattgccgactatatccaggccgtgcgcgagcgcatcgaaggccgcgacctgacgctgatgttcgagccgggccgctatatcgtcgccaacgcgggcgtgctgctgacccaggtcgagtacctcaagcacaccgagcacaaagacttcgccatcgtcgacgcggcgatgaacgacctgatccgcccggcgctgtaccaggcctggatgaatgtcaccgccgtgacgcctcgcgccagcgaagcccgcgcctacgacatcgtcggcccgatctgcgagaccggcgacttcctggccaaggatcgtcagctggccctggaagaaggcgatctgctggccgtgcattcggctggtgcctatgggtttgtcatgagttccaactacaacacccgcgggcgtaccgccgaggtgctggtggacggtgatcaagcgtttgaagtgcgtcgccgcgagacggtagccgagttgtatgctggcgaaagcctgctgccggagtaagccatgctgctgcgttttaccaagatgcacgggctgggcaatgatttcatggtcctcgacctggtcagccagcacgcgcatatcctgcccaagcacgctaaacagtggggcgatcgtcacactggcattggtttcgaccagttgctgatcgtcgaggcaccgagcaacccggaagtggatttccgttatcggatcttcaactccgacggttccgaagtggaacagtgcggcaacggtgcgcgctgcttcgcgcgttttgtgctggacaagcgcctgaccgccaagcggcagatccgcgtcgagaccaagagcggcgtgatcgagctggatatccgcagcgatggccagatcagcgtcaacatgggcgcgccacgcctggtgccagcggatattccgttccaggccaccgagcaggccgtcagctatgcgctggacgtggacggcaagaccgtcgacatcgctgcagtgtccatgggcaacccccatgccgtgctgcgggtcaacgacatcaacaacgcgccggtgcatgagctgggcgcgaaaatcgaacaccacccgcgctttccggcacgggtgaatgtgggcttcctgcaggtgatcgaccgtacccgcgcgcaattgcgcgtgtgggaacgcggcgccggcgaaacccaggcctgcggcaccggtgcgtgcgccgctgccgtggccgcgatcagccaggggtggatggattcgccactgctgatcgacctgcccggcggacgcttgtccatcgagtgggcaggccctggccacccggtgatgatgaccgggccggcctcgcgcgtatacgaaggacaggtccgtctatgagtgagccaagccaatgaccgataagcctcaagtacccgcacccgctaccccgagcgacagcctggaggccgccactgttgcggcgtaccttgaggctaacccggacttcttcgtcgagcacgaagagttgctgccggcactgcgcatcccccatcaacgtggggataccgtatcgctggtggaacggcagatgaagatcctgcgcgagcgcaacattgaaatgcgccacaagctctcgcacctgatggacgtcgcccgcgacaacgatcgcctgttcgagaaaacccgccgcctgatcctgaccctgatggacgccaccagcctggaagaaacggtgatcgcggtggaagacagcctgcgccaggacttccaggtgccattcgtgagcctgatcctgttcagcgacaacccgatgccggtgggtcgatgggtcagcggcagcgacgcacaaaccgcaatcggcggcctgctgtccgagggcaagaccatcagcggcaccttgcgcgagcatgagctggacttcctgttcggcgccgaacagcgcaagcagatcggctccaccgccgtcgtcgccctcagtcatcaaggcctgcatggcgtgctggccatcgccagccgcgatcctcagcactacaaaagctccgtgggcaccttgttcctgacctacatcgccgaagtgctgggccgcgtcctgccgcggttcaccaccgccctgcgcgcggtgcgctagccatggaacggcaactggacgcttactgcgctcacctgcgcaacgagcgccaggtgtcgccccataccctggaagcctatcggcgggacttgaacaaggtcctggcgtactgcgagaaacaacggatcgacagctggaaggccctggatatccagggcctgcgcagcctgatcgcgcgcctgcaccaggccggccaatcctcgcgcagcctgtcacgcctgctctcggcggtgcgcgggctctatcactacctgaatcgcgagggcctgtgcgaccacgacccggccaacggcctgtcgccgcccaagggcgagcggcgcctgcccaagaccctggacactgaccgtgccctgcaactgctcgatggtgcggtcgaggatgacttcctggcccaccgcgaccaggcgattttggaactgttctattcctcgggcctgcgcctttctgagctgaccggcctgaacctggatcaactggacctggcagacggcctggtgcaagtgctcggcaagggcagcaagacccgcgtcctgccggtaggccgcaaggcacgggaggcgttgcagctgtggttgccgctgcgcctgttgaccaacccggcggacgatgcggtgttcgtcagccagcaaggccggcgtcttggaccaagggcgatccaggtgcgggtgaaggccgccggggagcgagagctggggcagaacctgcacccacatatgctgcgacactctttcgccagccatctgctggaatcgtcccaggacctgcgcgcggttcaagagctgcttggccactcggacatcaagaccacacagatctatacccatctggatttccaacacctggcaacggtgtacgacagcgcccacccacgggccaaacgcatcaaggacggcgactcatgagtatcaagctgatcaccttcgacctggacgatacgctctgggacaacgtacccgtcatcatcagcgccgaagcgtcgatgcgcgaatggttggcgcttaacgccgccaaagtcggcgatttgccgctggagcacttcgccagtcttcgccagcaggtgttggagcgccatcccgagctgaaacaccgcatcagcatcctgcgccaccgggtgttgaagcatgcgtttgaagaggctggttatccacagcctgaggccacggaaatggcggatgagtgcttcgaagcattcattcatgcgcgccaccagctcaccccgttccccgaagccgagcccatgctcaaggcactgcgtcagcacttcctgctgggtgtgatcaccaacggtaatgcggatgtgcagcgcgttggcctcgcggactacttccattttgcgctgcgcgccgaagatatcggcatcgccaagccggatgcgcggttgtttcaggaggcgttgcagcgtggtggcgtagacgctggtgcggcggtgcatgttggcgatcacccgggggatgatattgccggggcgcagcaggcggggttacgggcggtgtggtttaacccgacgggtaaggtatgggagggagacaagcgaccggatgcgcagattcgtagcctgacagagttgccggaactgctgcgcagctggaagtaataccgcaggtcaaaatgtgggagggggcttgcccccgattacagtgggtcagccaatatattcgttggctgatacgccgctatcgggggcaagccccctcccacattttttatcgccggtgacctccaggcatgaaaaagcccgcagcgacggcgggctttttcttacaagcaggtgacggacctcaaataggtcggctgccgtacttgttatccggcttcttcggtgggtctgccaccacgttggcctcgacttcctgcactttgccgcctttagcgaggaattcttccatcgcacgggccagggcatcacgctctttgttcttggcttcaacgcttggcaattcgtctaccgacacagctgccttggctttgcctttggcgaccgggacaggtgcatcatcgccaccgtcgtcgtcggcaacgtcttccgccgccgcttcgaggccttcttcggtgtcgtcttcgtcacctacttcgagttcgtcgttttccagatcatcgtcgctcatgttctacctcatgacttgcgaaaagcagattagttatagcccagcttcaccctctgtcgacggctgccggaaaaaaatcaacatccactggttaaccagtggcttatgccccatcaccgtgcaaggtggcgaggactttacgagcaccgccatgatcacggtgctcgcccagataaacaccttgccaggtccccatcgccaagcggccggccttcaccggcaaactcagctggcagcccaggagactggccttgaagtgcgccggcaggtcgtccggaccttcgtcgttgtgttcgaaccctgcacggccttgcggcaccagcgaattgaaataacgttcgaagtcacggcgtaccgccgggtcggcattctcgttgacggtcaacgaggccgaggtgtgctgcagccacagatgcaacaagcccacacgacaggccttcaattcaggcaagccggccagcaactcatcggttaccaggtgaaagccccggggcttggcccgcagggtaatcagggtctgttgccacatacagttctccgcccatcggcgcgcattctagcgcgctcagggaaaaaacaaagtgccgaatacgcctacatgcctgtaagacattggcatgcggaaaagtgccgtgtgcatcccatcacaaacatcgcttaaaaaccgctacagcgtgttacgactgacaaacaccaggcaaaaaaatgcccggcaagccgggcatctttttttcgcgtacttacaagttgtagccgcgttcgttgtgttgcgccaggtcgaggccgaccgcctcttcctcttcggtcacccgcaggcccatgaccatgtccagcaccttgaggatgatgaacgtcacgatagcggtgtagatcaccgtgaagccgacgcctttggcctggatccagacctgtgcagccacgtcagtcaccgtgccgaagccgcccagtgctggggctgcgaacacaccggtgaggatcgcaccgacgataccgccgataccgtgcacaccgaatgcgtccagggagtcgtcgtaacccagcttgcgcttgaggctggtggcgcagaagaagcagatcacaccggcgaccaggccgatcaccagggcgcccattgggcctacggtgccagcagccggagtgattgccaccaggcccgccaccacacccgaggcgatgcccagtgcgcttggcttaccgtgagtgatccactcggcgaacatccagcccagcgccgcagcagcggtagcgatctgggtgaccagcatcgccatgccggcagtgccgttggccgcagcggcagagccggcgttgaagccgaaccagccgatccacagcatcgccgcgccgatcagggtgtaaccgagattgtgcggtgccatcggggtggtcgggaagcctttacgcttgccgagcacgatgcacgccaccaggccagccacaccggcgttgatgtgcaccacggtgccgccagcgaagtcgagcactccccagtcacccagcaacgaacccggaccgccccacaccatgtgggcaatcggcgcatacaccagggtgaaccagacgcccatgaagatcagcatcgcggagaacttcatacgctcggcgaacgcaccgacgatcagcgccggggtgatgatggcgaaggtcatctggaaggtgacgaacaccgcctcagggaacagcgccgcagggccggtgatgctcgccggggtcacacccgcgaggaacaacttggacaaaccgcccacgaacgagttgaagttgacgacgcccgcttccatcccggtggtgtcgaacgccatgctgtagccgtacacgaaccacaggatggtgatcaggccggtgatggcgaagcactgcatcatcacggaaagaatgtttttggagcgcaccatgccgccgtagaacagcgccaggcctggaatggtcatgaacagcaccagcgcggtggatgtgagcatccacgccgtgtcgccggaattgaggactggagccgccacttcgtctgccgccatggccaggcttggcattacgatggacaacagggctccgagccctgcgaatttacgcagagtcatattgttttctcctggggcgttggggtttggcggcttagattgcgtcggtatcggtttcgccggtacggatgcgaatagcctgttccagattgaccacgaagatcttgccgtcaccaatcttgccggtgttggcagccttggttatcgcctcgataacccggtcaagatccttgtcgtcaatggcgacatcaatcttcaccttcggcaggaaatcgactacgtattccgcgccgcgatacagctcggtgtgacccttctgccgaccgaagcctttgacctcagtaacggtaatgccctgcacgccgatctcggacaacgactcgcgtacatcgtccaacttgaacggcttgatgatggcagtgactagcttcatgaaaactctctcccgaattggtggacttgccccaggaaaacaaacccgtctcaagtctaagcgcagtgcctggctttgtaacgcgtcgtcgcctcagcatttgccgttgcgacgccagcgaaccactggtgacgaaacctgtacccctgatccgtcggcgcactgcattcgtcacagcgactgcatcagtgcatgggtcatgatcgtctaagcagaaaccttgccagctccgtaaaaatcactgaaatcagtcctttgcccactttctcccaactgcggggctttttgatggcgtcaatgcgcacaaaaacagtgcgccaccgcccggcccgctgcgcgaaaagcgtgcgctcgccgccacggaaaagactatagacgctgcgtgatacactgccggccaacagttttccggaatatttcccatgctcgcgcccaaagacctcctcgacgccctgagcggccacgcctctcgcctgttcagcggcgacaccccgctgccccgcaatgaaatcgaaagccagttcaaggcgctgctgcaaagcggcttcagcaagctcgacctggtgagccgggaagagtttgatagccagatggtggtgctggcccgcacgcgggcgcggttggagagcctggaggcgaaggtagcggagttggaagctaggttgacgccgccctctgctgaataaacgcggtcagtgtgggagctggcttgcctgctcccacataaagcgctgcgaacgactctggatacgttctgtaaaacctccctcgcctcgcatttccccacctcgtctacccttgaaaaacccgcaggaagcggccctcttttcaaggaacgagcatgtccctcgccatcgtccacagccgcgcccagatcggcgtcgaagcgcctgccgtcaccgtcgaagtgcacatggccaatggtttgccgtccctgacactcgtcggcttgccggaaacagccgtcaaggaaagcaaggaccgggtgcgtagcgccattctcaactccgccctgcaataccccgcccgacgcatcaccctcaacctggcgcccgccgacctgcccaaggacggcgggcgctttgacttggcgattgcgttgggcatcctggcggccagcgtgcaggtgccagccttgctgctcgacgacgtggaatgtctgggagaattggcgctgtccggcgaggtgcgcgcagtgaaaggcgtgttgcctgcggcattggcggcgcgcaaggccgggcgcaccgtgatagtgcctcgggcgaatgccgaggaagcgtgcctggcctcggggttgaaggtgatcgcggtggatcatttgctgcaggtggtggcgcacctgaatgggcatcagcctatagaaccctacaaatccgacggcttgctgtacctgaacaagccatacccggacctgagcgaagtacagggccagctcgccgccaagcgcgcattgctgattgcagcggcgggcgcgcataacctgctgttcagcggcccgcccggcaccggcaagaccttgctcgccagtcgcctgccgggtttgttgccgccgttgagcgagcaggaagccctggaagtggcggcgatccagtcggtcgtcagccttgcgccgctgagtcactggccacaccgaccgtttcgccagccgcaccactctgcctcaggtccggcattggtgggcggcgggtcgaaaccgcagccgggggaaattaccctggcccatcacggcgtgctgttcctcgatgagttgcctgagttcgaccgcaaggtgctggaggtgctgcgcgagcctctggaatcgggtcacatcgtcatctcccgcgcccgcgatcgcgtcagcttcccggcccgcttccaactggtagccgccatgaacccctgcccttgcgggtacatgggcgaacccagcgggcgttgtcgctgcacgccggagcagattcagcgctatcgcaacaagctctccggccccttgttggaccgtattgatttgcacctcactgtggcgcgagaaaccaccgcattgaacccaacccagcaggcgggcgataacaccgccgaggcatcggcacgggtcgcccaggcccgcgatcgccaacagcaacgccagggctgtgcaaatgcgttccttgatctgccggggctgcgcaagcactgcaagctgacgaagaccgatgaaggctggctggaaaccgcctgtgaacggctgacactatccctgcgcgctgcccatcgcctgctcaaagtggcgcgtaccctggccgaccttgagcacgccgagagcattactcgaccgcacttggcggaagcgttgcagtatcggcccgcggccgtcggctagggtgcctctgggaagtccaacagcaggcgcgccacttccatcacttcatccaaggccgcttccgccgactccatggagggtttgagcatcaggtcgtcggcatagcccatcgccacggcaaagatctggcgggcagcgcgttgtggcgagtcacaacgcaggacattggcagccacaccccgctcgatcacctcgacgagcatgccttgccattgggcgttgatcgccaggtaagcctgggccatttccgggtcctgcatcgcttcgtcccaagcatccagccacagtgcccaccctgcatcagcggtgcttggcaggcagtcacgcaaaaaacccacaaaggcgtccaagggcgctgcttctgccaggggcgcgcgcacttcgtccaactgttcgttggcaaaccgcacgaaggcttcgcggcgcagttccttccagtcgctgaagtagtgatagacatggctgcgggacaggccggcatgttcggccaggtcgcgggtggacacatcggcaaaacccttgctgcgaaacagctcaagggcggcggcgatgatctggtctttacggtcgatacgcgacatgggcaattccttccaggcaccggcagataagcggcgcttgctttttgagcgatcgctcaaggatacttgagcagtcgctcaataatagcgtctatcactcctttggtgcaccccatgtcatccgccacacctcaaatcctgatcgaagaaagccggaaaatcggccagcaatccgccggccagacgctcaaggccattgccaaagcctatccgggcaagctgtttgccacgctgtcgctggtcgcgctggagaacgcgctgctgctggcctacccgttgtttgccgggtttgcggtggacgcgatcatccgtggcgacgccagcaacgcgctgttctacgccgccgtggtcctggcattctgggtggtcggcgcggcgcggcgggcgttggatacgcggaccttcacacggatctacgccgatctggcggtgccggtgatcctcaatcaacgcctgcagaaccacagcacgtcgaaatcggcggcacgggtggtgctcgcccgggagttcgtcgacttctttgaaaagcatgtaccgatcattgccacggcgctggtgtcgattatcggcgcggcggtgatgttgatcgtgatcgagccctgggtaggcctggcgtgcctgggcgcactggtgctgtgcatcacgttgttgccacgctttgcccggcgcaaccaggagctgcatgaacggctgaacaaccggctggaaaaagaaatcggcctggtggaaaaggtcggcgcaccgaccctgcggcgccactaccaggtgctttcacgcctgcgcatctggctgtcggatcgtgaggcggctgcgtacctgtttctgggtacgctggccgccttgctgtttgtggtcgccatcagccaattggcgctgtcacccgcggtcaaggctggccatatctacgcggtcatgacctacctgtggaccttcgtcaccagcatggacgaagcccccggcatggtcgaccaactggcgcgcctgaaggacatcggcaagcgcgttgaccctggcctgggcgatcgctaggcctcaacgaaaccggtccacctcatgccgcaagcccgccgccagggtttcgagttccttggcggtgatcgccaggttcgacaccacttcccgctgctcgctgttggccagcgcaatgctctgcaagttgctgctgagcaaggtcgcggtgctgctctgttcctgggtggcggtggtgatcgcggcaaactgctgaccggccgagcggctctgctcgtcgatacgcgccagggccgacgccacatcggcgttgcgcgacaggccttcctgcatcagcacattgccgtgttccatggtgctgatggcgttgccggtttcctgctggatgctctggatcatcccggagatttcatcggtggcctcgcgggtgcgcgacgccaggttgcgcacttcatcggcgactaccgcaaacccacgaccctgttctccggcacgagccgcttcgatggcggcattgagcgccagcaggttggtctggtcggcgatcgaggtgatcacgccgacgatcccgccgatctcctgggagcgctggcccagggtattgatcaccgtggccgtgctgttgagcgcttcagcgatgtgctccagggacgacgacgcctcttgcatcgagttgcgcccgatgcgggtttgctgggcgttttcctgggccaggcgttcggtgctgcccatgttgtcggcgatgttcagcgaggtggcactgaactcttccaccgcgccggccatgctggtgatctcgccggactgctgctccatgccttcataggcgccaccggacaaaccggacagcgcctgggcacggctgttgacctcttcggccgccttgcggatatgcgagaccatggtcgacagcgcttcacccatctggttgaaactgcgcgccagttggccgatttcgtcatggctggacacgttcaagcgtgcgctcaagtcgcccgcgcccaaggcttcggcctggcgcaccaggtctcccaacggcgccagcttgctgcgcagcagccacaccgttgcaccgaccgccagcagcatggccagcacgctgccgatcaccaggcggataccgacgtcccacgtcaccgagcggatttcggccttgggcatgctcgcgaccacggcccacggcccgccttcgaaaggcaccgacacgctgtagaagtcttcgttcttgtctgcccagaaaccccctgtacccggcgtcttggccaggtccagcatcacgggaatggcttgatccagcgcctgcacgcccgccggcggtaccagccagcgcttctgctcatccagcaaggcgagggagccggtctggccgatgcggaaacgcttgaggttctcgaactgggcattctgcgcatcggtgtagtcgaacccgatgaacaacaccgcgatcacctgcccactgctgtcgcgcaccgggctgtactgggtcatgtaggagcggtcgaacagcaccgcgcggccgatataggtctgcccgccgagcacccgctggtaagccgggccctggcgatccagcaccgtgccgatggcgcggttgccgtcctgcttggtcaacgaggtgctgatacggataaagtcttcgccgctgcgcacgaataccgtggccacgccgccggacatctgcttgaactcatccacttcattgaagttgttgttcaacacctgattgcccaggtacaagcttggggtctgcacaccggccacggtcacaagctggtccgcatgcacgctcaagccagcgccgaagcgcttttcaaacagcccgctcaaacgctgggtactttcgcgcaaggtgctgtggaaggtgttgagttggtcggcgagcaaacgtgcctcgctggccaggtgctcctcgcgggtagcgaggttggcggagtcgagggaacgcaaggcaaacacggtgctgccgctgatgacgacagccagaatcacggctaatgccaggcctaactgggaggctatccgggcgcgaggttgagacatgacggctcctggccgaggccaggatcatcctgatctcatagcgctgctcggcaaattatctggtgggaaacgttggtgcacgatggttccaacacacctacttcggcgggctgaagcaatacttgagcgattcacaggggtatcacgcaaacgattgcacaaacggtcagcgactcctcaatcgaggcgttcgacctggggcagttccatggccttgacttccgcctgcagaaactccgccaagcgccgcaaacgctcaccgccggggcgggttttcggccataccaggtagtagttttcgccactggccaccgccgttggccaaggcaggctcaggcgcccctgggccacgtcttcggccaccatcagcaagtcgcccatggaaacaccgtaaccccgcgcagcggcgatcatgcccagttcgagagtatcgaacacctggccgcccttgagcgacacctgggacgccaaccccatgcgttgcagccaattgcgccagtcgcgacggtcgggcgtggggtgcaacagttcggcggtggccaggcgcgcagcatcccacggcccatcctccaacaggttcggtgcacctaccgggatcagcagttccgggaacaggtagctggcctcccaatccgccgggaagtgcccgtagctcagcaacaccgcgcagtcgaacggctcctgattgaagtccacctcgtccacgctcatccacgcgctggtcagttgcacttcattgcccggctgcaacgcccggaaacggctcagccgcgccagcagccagcgcatggtcagggtagacggcgccttcatgcgcaggatgtcgtcttcggcgttcagggtatggcaggcccgttccagcgcggcgaaaccttcgcgcacgcccggcaagagcaggcgcgccgcttcggtgagctgcaaggtgcggccgctacgctggaacaggcgacaggcgaaatgctcttccagcgtgcggatatgccggctcaccgcactttgcgtgatggagagctcctccgctgcccgggtgaaggaattgtgccgcgaggcggcctcgaatgcgcgcaaggcatacagcggggcaagacgtcgagacatcggcagattcctacagagcaataccgcaccctaccagatcagcaggcatgagtttaagtcatgtacatcatcgctttaatccttttgtgtaatgaaccgagagcgccgagaatcaagccttcccaaccttctgacttttcgagcgtgatgatcatgcaacatccggcacgtaccgaactctgggccattctgcggctgtcagggccgttgattgcctcacagttggcgcacatgctgatggtgctgaccgacaccctgatgatggcgcgcctgagccccgaagccctggccggtggcggcctgggcgcggcgacctactcgttcgtggcgattttctgcatcggcgtgattgccgccgtgggcactctggtggccatccgtcacggcgcgggcgatatcgaaggcgccacccgcctgacccaggccgggctatggctggcgtggctgatggccctggcggccggtttgctgctgtggaatctcaagcctgtgctgctgatgtttggccagaccgagaccaacgtgcactcggccgggcaattcctgacgatcttgcccttcgccctgcccggttacctgagtttcatggccctgcgcggcttcaccagcgcaatcggcaaggcgacgccggtgatggtgatcagccttggcggtacggtaatcaactacctgctcaaccacgcgctgatcgaaggcatgttcggcctgcccaagcttggcctgatgggcatcggcctggtcacagccatcgtcgccaacggcatggcgctgacgctgatgtggtacatccgcagcaaccgcacctatgcggcctacccactgagtaccggcctgctgcgcctcaacacccagtacctgcgcgagttgtggcgcctgggcctgccgatcggcggcacctatgcggtggaggtcgggctgttcgcgtttgcggcactgtgcatgggcaccatgggcagcacgcagttggccgcgcaccagatcgcattgcagatcgtctcggtggcgttcatggtgccggcggggatgtcctacgcggtgaccatgcgcatcggccagcactacggcgccgggcagttgctgcatgcgcgcctggccggtcgtgtcggcattggctttggcgcggcgatcatgctgggatttgctggcgtgttgtggctctattccgacccgctgatcggactgctcatcgaccacaacgacccggcgttccacgacgtgatcgtcctggccgtcagcctgctggccgtcgccgcctggttcgaactgttcgatggcgtgcagacaatcgccatgggctgcattcgcgggctcaaggacgccaagaccaccttcctgatcggcgcaggttgctattggttgattggcgcaccgtcggcctggctgatggccttcaccctgggctggggaccgaccggcgtgtggtggggcctggcgttgggcctggcgtgcgcggcggtgagcctgacctgggcgtttgaggcaaagatgaagcggatgcttcgccaggagcctgaacctcaaggctcattccaagccgaggccctgcacgattaacaatgtgggagggggcttgcccccgattgcggcgtgcccgtcactggttttttgactgacccaccgcaatcggaggcaagcctcctcccactttttgattggattgccacctcagcccagcagcgcttgctggcttttgccgaaagtcaggtactccaccaactccggcaacggcagcggcttgctgatcaggtaaccctgggcctggtcgcagccaaacaaacgcagcagcgccagttgctcaggcgtttcaacaccttcggccaccacttccaggttgaggttgtgcgccaggttgatcatggcatgcaccagcttgcggttttcttcgcgctcctccataccgccaacaaagctcttgtcgatcttcaacaaggcaatcggcaggctgttgaggtgcacgaacgatgagaagcccgtaccgaagtcatccagggaaaaccgcacacccaggcggccgagggcatccatggtctgcttgaccaggtcactgcggcgcatcacggcggtttcggtcagctcgaactccagccattgcgcctccacgccccgctcggcaatcagccgactgagggtcgagagcaactgactgtcctggaactggcggaacgagaggttgaccgccatgtgcaacggcggcaggccacgttcgcgcaggtcttgcatgtcgcgcagggcccgggagatcacccagtagcccagcggcacgatcaggccgctttgctcggccagtggcacgaactcactcggcggcaacaggccgcgctcgccatggcgccagcgcaccagggcttccaggccgacgatatggccgtcgtccaggtccaggcgcggctggtaatgcagctccagttcgtcacggcgcaaggcgcggcgcagctcgctttccaggtcggcgaggctgcgcgcgttgcggttgatacgttcgttgaagatatgaaaagtgcagccctgggtgctcttggcctgctgcatggcgatatgagcgtgccacatcagcgggtcggcaccggcacgggccctggcatgggccacgcccaggctacaaccgatcagcaggctttcgccatccacccaatagggctcggccatgacttcggtgatgcgctcggccatccactcggcacgctggggcgcacgacgggtgtcgatcagcagggcgaattcatcgctgcccaggcgcgccagttggtcgccgacctcgagctggctcttgagccgcgacaccacttgcaggatcaaccggtcgccggcctggtggccgagggcatcgttggcgtggcggaagttgtcgaggtccaagtggccgagggccaggccacggccttcattctcggccaggcgcgcggtcaacagggtctggaagccctggcggttggcaatgccggtgagcgggtcctgttcagccaggcgttgcagggtgttttccagcaccccacgctcgcggacgtggcgcaggcagcggcgcactgtatcggcatccaatacatcacgcaccagccaatcgctgacgccaagcggcgaaaccagcggttcctgttccagcaacaacacgcacggcaggctgcaacggccaggcccgggttgcaggccgggcgtggtcaagagtacggcgctgtggtcgtcatcgaacagacggctcacggattcccagtttggtgcgctgatcagcacagccccatcgcccatcggcgccaggcactcgcgcaataacgctgcccacgcgggctcatcggccagcagcagcaaacgcaagggttcgacaggcgtagacaagctagctccctagactctgcaaaaattcgtggcgacgcgcattatgacgtgcggcctgagaatcaccaatgataggggttatcaaacacgcgaactgtgaacattagcctcaaaacaaccctcacatcctgcggcaaagtatcaaaaccggcaaatttagatcgagtggtacgtcacactgtcgttctgacagagcagaatcctgccagcctgttaaaatgcccgcccttttgaacaacgactccctgaattctgtatgtcccgactcaatccccggcagcaagaagccgtgaactacgtcggcggccctctattggtgctcgccggcgcaggctccggcaagaccagcgtgatcacccgcaagatcgcgcacctgatccagcagtgcggcatccgcgcccagtacatcgtcgccatgaccttcaccaacaaggctgcgcgggaaatgaaagagcgcgtcggcaccctgctcaagggtggcgaaggccgtggcctcaccgtgtgtaccttccacaacctgggcctgaacatcatccgcaaggagcatgcgcggctgggctacaagccgggcttctcgatcttcgacgagaccgacgtgaagtcgctgatgaccgacatcatgcaaaaggaatacgcaggcgacgatggcgtggacgagatcaagaacatgatcggcgcctggaaaaacgacctgatcctgccgccccaggccctggaaaatgcacgcaaccccaaggaacagactgccgccatcgtctacacccactaccagcgcacgctcaaggcgttcaacgcggtggacttcgacgacctgatcctgctgccggtaaagctgttcgaggaacacgccgacatcctcgaaaaatggcagaacaaggtgcgctacctgctggtggacgaataccaggacaccaacgccagccaatacctgctggtaaaaatgctgatcggcaagcgcaaccagttcaccgtggtcggcgacgacgaccagtcgatctacgcctggcgtggcgcccgcccggaaaacctgatgctgctcaaggacgactacccgtccctgaaagtggtgatgctggagcagaactaccgctccaccagccgcatcctgcgctgcgccaacgtgctgatctcgaacaacccccacgaatttgaaaaacaactgtggagcgagatgggccacggcgatgagatccgcgtgatccgctgccgtaacgaagacgccgaagccgagcgcgtggccgtcgagatcctcagcctgcacctgcgcaccgaccggccctatagcgatttcgcgatcctctatcgcggcaactaccaggccaagctgatcgaactgaaattgcagcaccaccaggtgccgtatcgcctgtcgggcggcaacagctttttcggacgccaggaagtaaaagatctgatggcctacttccgcctgatcgtgaacccggacgacgacaacgccttcctgcgcgtaatcaacgtgccgcgccgcgaaatcggttccaccaccctggaaaagctcggcaactacgccactgaacgcaagatctcgatgtacgccgccaccgacgaaatcggcctgggcgaacacctggactcgcgcttcaccgatcgcctgtcgcgcttcaagcgcttcatggacaaggtgcgcgagcagtgcgccggcgaagacccgatcagcgcgctgcgcagcatggtcatggacatcgactacgaaaactggctgcgcaccaacagttccagcgacaaggccgcggattaccgcatgagcaacgtctggttcctgatcgaagcgctgaagaacaccctggaaaaagacgaagacggcgagatgaccgtcgaagacgccatcggcaagctggtgctgcgcgacatgctcgaacgccagcaggaagaggaagacggcgccgaaggtgtacagatgatgaccttgcatgcgtccaagggcctggaattcccctacgtgttcatcatgggcatggaagaggaaatcctcccgcaccgctccagcatcgaagccgacaccatcgaagaagaacgccgcctggcctacgtgggcattacccgcgcgcgtcagaccctggccttcacctttgccgccaagcgcaaacagtacggcgaaatcatcgattgtgcccccagccggttcttggatgaactgccgccggatgacctggcctgggaaggcaatgacgacaccccgaccgaggtgaaggccgttcgcggcaacaccgccttggcggacatacgcgcgatgttaaagcgctagaatcgactacttttcaatctactttcggcgcacaccgcgtcattagaggaagctttccgtggaagcactgcacaagaaaattcgcgaagaaggcatcgtgctttccgatcaggtactcaaggttgacgcctttctgaaccaccagatcgacccggcgctgatgaagctgatcggcgacgaattcgccgcactgttcaaggactcgggcatcaccaagatcgtcactatcgaagcatcgggcatcgcaccggcgatcatgaccggcctgaacctgggtgtaccggtgatcttcgcgcgcaagcaacagtccctgaccctgacggaaaacctgctgtcggcaacggtgtattccttcaccaagaaagtcgaaagcaccgtggcaatctccccgcgccacctgaccagcagcgaccgggtgctggtgatcgatgactttttggccaacggcaaggcgtcccaggcgctgatctcgatcatcaagcaggccggcgcgaccgtcgccggtttggggatcgtgatcgagaagtcgttccagggtgggcgtgcggaattggatgcacagggttatcgggttgagtcgctggcgcgggtcaagtcgctggaaggtggcgtcgttaccttcatcgaataacccctgccttaaagtggttgtaacagtgggagggggcttgccccctcccacattgaccctgtgttgcctgtcagtgcgcggtggcctgtaggccggcgagtaggagccgctggtacagatcctctttcagcccctccggcttacctaaccgcatccgctccagatgcttgggaaacacctccggttccggcgcatccaacgccgccttgcccagctccagaatctccgtcagcttgaatttgctcttgagccagttcagcgcccgcaacaaatcccgttcttcatcagtgaaatcactgcccagcggatactccggaaacaaccgacgatggcgtgcctgaatcccctgcaagcgctccggcgtgttatcggcaaagcgcggatccagctggaaatccttgggcagcttgccggccttttgcgcctccttgatcaaatcgtcctggaagcgtgagtcggtgatattgagcaacgcctcgatcaccttggcatccgtctgcccgcgcaagtctgcaatgccatattcggtgatgacaatatcccgcagatgccggggaatggtgcagtggccgtagtcccagacgatattggaactgacctcccccgctgactcgcgccaactgcgcaaaatcagaatcgaccgcgcaccttccagcgcatggccttgggccacaaagttgtactgcccgcccacaccactgagcacacgaccgtcttccaactggtcggccacgcccgcgccgagcagcgtcaccatgatcgcgctgttgataaaccgcgcatccaaccgctgcaggcgcttgagttcttcctggccgtacagctcgttgatgtagctgatgcgggtcatgttgaattcgaggcgcttggcgtgagtcatttcctgcaggcgctggtagaaactgcgcgggccaagaaaaaaaccgccgtggatcgaaatgccgtcgggctgcgccgcatcgtcgagcgtgccggcgttggcctgctgttgcgtggccacatccgggtagaccttgcgacggataatccccgcgtccgccagtaccaacaggccgttgacgaacatttcgctgcacccgtaaagcccccgggcgaaggggtcgacaccgccttcacggctgatcagcggtgcccactggtacacgtccaggtcggtcagcagcgagcgataggactcattgtcggcctggcgcgccagcaacgcggcggtcagcgcatcccccatggagccgatgccgatctgcaaggtgccgccatcgcgcaccagggtgctggcatgcaagccgataaaatggtcctggaaacccaccggcatattcggcgtggagaacaacgtggtgctgtctttttcatcgatcaggtaatcgaaggcatccatgcccagctcagagtcgccgggcatatagggcaaatcgctgtggacctggccaacgatcagcacggtttcaccggcatcacggcgcttggcgatcatcggcaacaggtcgagggtgatatccgggttgcagctcaggctcaggcgatccggatgttcgctgctgctggcgaccagttgcgccaccaggttcaagcccgctgcgttgatgtcgcgagcggcgtggctgtagttgctgctgacgtaatcctgctgcgccgactcgctgtgcagcaagctgcccggctgcatgaagaactgctgcacatggatatttttcggaaggctgtcgttgtgcaggtcggcgaggaaatccagctcggggtaatcgccgaacacccgctcgataaagggttcgagaaagcgtttctgcaaaccatcgcccatcgtcgggcggcccaggctcaacgcggtatagatggtcagcgcccgctccggcaacttggcgatgcgccggtacaaggcattggcaaaccggttcggcttgcctagcccgaggggcatgcccatgtggatatgcgccggcaaccgcgccagtacgtcgtcaactgcttgctcgattgaacacaactgcaccatccgaccctcctgaacattccatgattaggggttggaccgagcttgccgggtctttgctgcaatgaacagcgctgaaacaccaatcccaggcacaaaaaagccgctcgtaagcggcatttttgacgaagatcggcggatcagaggccagacatcttcttgattgcacccttgaggtcatcatccgagcaatcggcacaggtgccttttggcggcatcgcgttgataccggtgatcgccttggccaggatgccgtcaaggccgccctggtgatcggcgcgttctttccaggccgctgtgtcgccgattttcggcgcgcccaacaagccggtgccgtggcaagcgttgcagtgcttggcgatgatgtcatctggcgtcttcgcagcgccgccgcctgcggcgaccgccacctccatgcccttgcattcctggccctggacgcagacctggccgacaggctccaggcgcttggcaatatcatcattggtcgcagcttgagcgctgacagcccatagggccagtacggttgctggtgcagccagcattttcataattaggttcacgcgttcaccctcaatggtggctattcacgcctgcggccacggtttcgcaggcggcgaaagtataacggttagcccgcctggccgaaacaaccctattaaataaagggagattcgacctcacggaatacagctcgggtgcctctgcgacgctggcaggacgcctcttttcttaaaagttcgcgggtgtggctgcgctgattagtcgcgccggcacgtcgaacggattgcgaaaacgatggggcttggtgctttcaaagtagtagctatcgcccgcttcgagcacaaaagtttcaagaccgaccaccaactccaggcgaccttccaccagaatcccggtttcttcgccttcgtgggtgagcatttcttcgcctgtgtcggcgcccggcgggtagatttcgttgagaaacgcaatcgcccggctggggtgcgcccgtcctaccagtttcatggtgacggcgccgtcggagatgtcgatcagctcattggctttatagacgatctgcgtcggtatttcctggaggatctcctcggaaaagaactcgaccatcgacatggggatgccgcccagcaccttgcgcaaggagctgatcgaggggctgacgctgtttttttcgatcatcgaaatggtgctgttggtgacacccgcacgcttggcgagctcgcgctgggaaagacccttcagtttacggatggattgcagtcgttcgccgacgtccaatgcaggagcctcctaggattcaggctttgttgtaattgagcgttatcatggcgacagcgttcagtatttacaacacttgggcctaaatcccgggcggttgcgttcgtgcctggcgatcaagccccggaatagagccttggcacgcggcgcaggttgcagaacagctgataggggatggtctcggcggcaaccgcgacgtcactggcgaggatatgtttaccccatagctccacggtggaaccaaggccggcttgcggcacgtccgtgaggtcgatgcacagcatgtccatggacacacggcccagcaattggctgcgttgaccggccaccagcaccggcgtaccggtcggcgcgtgtcgtggatagccatcggcataacccatggcaactacaccgatacgcatgggtttcggtgtgatgaacttggcgccgtaacccaccggctcccccgccggcagttcacgcacgcagatcaccttggactccagggtcatcaccggctgcaagcgcgcagccacggcctggtcttcgccaaacggtgtagcgccgtaaagcatgatgccgggacgcacccaatcgctggacacagccggccagcccatcaccgacggcgaattgcgcaggctgacctcggccgccaagccctggcgcgccgcgtcaaacaccgccacctgttcatcgctgcgcacgcagtcgagttcatcggcacgcgcgaaatggctcatcaaaacgatcttggccactttgccgctggccagcaggcgctggtaagcctcgtggtaatccttcggatgcaggccgacacggtgcatgcccgaatcgagcttgagccagacagtcagcggcttgctcagtacggcctgttcgatggcctccagttgccacagcgaatgcaccacgcaccagaaatcatgctcgatgatcagcggcagctcgtccgcctcgaagaaaccttccagcaacagcacgggtgcacgaataccggcggcgcgcagctccaatgcctcctcgatgcaggccacggcaaacccgtccgcctcggcttccaacgcttgggcgacgcgcacggcaccatgcccgtaggcatcggccttgatcacggcaagggccttggcccccgtgacttcacgggccaattggtagttgtggcgcagggcttggaggtcgatcagggcacgggcaggacgcatggcggcaggcttctaggcggcaaagtgaagaaaaaccggcaccgacagacagcatcggcaccgggagagggatcggtgattaaggcagcgcggccacaacggacagctccaccaggatttgcggttcgcacagcttggcttcaaccgtggcacgggccggggcgacacccttgggcagccacttgtcccacaccgcgttcatgccggcgaaatccgcgtcgatgtctttcaggtagatcgtcaccgacagcagcttgctcttgtcggtgccggccaggtcgagcaaacgctcgatattggccagggtttcacgggtttgctgttcaatcccggcgttcatgtcgtcaccgacttgccccgccagatacacggtaccgctgtggacaacgatctggctcatgcgctcattggtgagctggcgctggattgacatgttgtgcggactcctggtggttgccataacgggaaatatcgaggccttcggcactgatctgcggggttttcttcgccatcaggtcggccagcaaacgaccggaaccacacgccatggtccaaccgagggtgccgtggccggtattcaggaacaggttcttgaacggggtggcaccgacaatcggagtgccatcgggggtggtcggacgcaggccggtccagaaactggcttcggtcaaatcgccgccctgaggataaaggtcgttgacgatcatctccagggtttcacgccgacgcgggttaagcgacaggtcaaaaccggctatttcagccatgccaccgacgcggatgcggttgtcgaaacgggtgattgcgaccttgtaggtctcgtcgagaatcgtcgaagtcggcgccatcgccgggttggtgatcggtacggtcagcgaatagcccttgagcgggtacaccggcgccttgatccccagcggcttgagcagcttcggcgagtagctgccgagggccagcacgtaacggtcggcggtctccagcgtgccgtcgatccacacgccgctgatgcgatcaccggcgtagtcgagacgctggatatcctgttcgaagcgaaattgcacgcccagttgcttgcacatgtcggccaggcgggtggtgaacatctggcagtcaccagtctggtcgttcggcaggcgcagggcgccagcgagaatatccgtgacgctggccagggccggttcgacgcgggcgataccggcgcggtcgagcagctcgaacggcacgccggactccttcaacacggcgatgtccttggccgcgccatcgagctgcgcctgggtgcggaacaactgggtagtccccaggctgcggccttcgtaggcaatgccggtctcggcgcgcagttcgtcgaggcagtcacggctgtactcggacagacgcaccatgcgctccttgttcaccgcgtaacggctggcggtgcagttgcgcagcatctgcgccatccacaggtattggtcgatgtcggcggtggccttgatcgccagcggcgcatggcgttgcagcagccacttgatagctttgagcggcacgcccggcgcggcccatggcgaggcatagcccggggacacctggccggcgttggcgaaactggtttccatggcagcggcaggctgacggtcgaccacaaccacttcaaagccggcccgcgccaaatagtaggcactggtcacaccaatgacgccgctacccaagaccagaacgcgcatttttatatcctcatcgcgggcatggccgctgacgtgtgttattcgagcaatgatgagcgcagtgtaaaaaacaattgccagtgcatttcactatataactgcctatatttggcgacaattctcggcaaaaacccttttcacagaggcgtatcccctatgcgtaccaacacccagaccaagcgggagctggacaagatcgatcgcaacatcctgcgcatcctgcaaaccgacgggcgtatttcgttcacggagctgggggaaaaggtcgggctgtcgaccacgccctgtaccgagcgcgtgcgccggctggagcgtgaagggatcatcatgggctacaacgcgcggctcaacccccagcatttgaaggggagtttgctggtatttgtcgagatcagcctggattacaagtccggcgacaccttcgaggagttccgccgcgccgtactgaaactgccccatgtgctggagtgccacctggtttctggcgacttcgactacctggtgaaggcgcggatttccgagatggcgtcgtaccgcaaattgcttggcgacatcctgctcaagctgccccatgtacgggagtccaagagctatatcgtgatggaagaggtgaaagagagcctgaacctgccgatcccggactgacctgagacactcgggtcaacatgtgggagggggcttgccccctcccacatttggactgtgtaaaaccgctaaaccaacacctgccgggtgctcgccatgtagtcgtggatctgcttttccacccgtgggtgaatcagctccaccgggcgccgtccattcgggcacggaagggtcttggtggtgccgaacaacctgcagatcaacgggcgctcgtcgtacaccgtgcagccgttggggcccaagtgcacgcagttcagctcctccatggccgcgtcctgctcagccgcagtcttacgcggcaggcgcgacatttcctcgggcgaggtggttaccggcccacagcagtcgtggcaaccggggacgcactcgaacgaaggaatctgcctgcgcagggcgctgactttctgactgttgcaactcatcgaaacacgtaccgaacggcgaataggcgtggattctgccgcaaaacgccctgcgcagacagcttcgtccgaccgctgtatcctgcgtcaaattttccaaacagggatgctccccatgactgccagcgcccggcacaccgcttcctactacgccgccagcagcgtgccgcaacctgagtacccggtgttgaccggcgaactgaccgcggatgtgtgcgtggtcggcggcggtttctcggggctgaacaccgcgctggagttggccgagcgtggattcagcgtggtgttgctggaagcgcgcaagatcgcctggggcgccagcgggcgtaacggcggccaactgattcgcggcgtcggccatggcctggaccagttcgccaacgtgatcggcaccgagggcgtacgccagatgaagctgatgggcctggaggcggtggagattgtgcgtgagcgcgtcgagcgctaccagatcccctgcgacctggcctggggctactgcgacctcgccaacaaaccccgcgacctgcacggcctggccgaagatgccgaagaactgcgcagccttggctatcgtcacgacatacgcctgctgcaagccaacgaaatgcccagcgtgattggctccgaccgctacgtgggcggcatgatcgacatgggctccggccacctgcacccgctgaacctggctctcggcgaagccgccgccgcgcagcatttgggcgtgaagctgttcgagcagtccgaagtcacgcgcatcgactacggccccgaagtcagcgtacacaccgcccaaggcaacgtgcgcgccaagactctggtgctggcctgcaatgcctacctcaatggcctcaacccgcacctcagcggcaaggtgctgcccgccggcagctacatcatcgccaccgagccgttgagcgcagcccaggccgccaacctgctgccgcagaacatggcggtgtgcgaccagcgtgtcacggtggattacttccggctgtcagccgaccgccgcctgctgttcggcggtgcctgccactattccggtcgcgaccccaaggatatcggcgcctatatgcgcccgaaaatgctgcaggtattcccccagttggccgacgtaaaaatcgatttccagtggggcggcatgatcggcatcggcgccaaccgtttgccgcagattggccgcctggccgaccaacccaacgtgtattacgcccaggcctacgctggccatggcctcaacgccacgcacctggcgggcaagttgctggccgaagccatcagcggccagcaacagggccgcttcgacctgttcgcccaggtgccgcacatcaccttccccggcggcaagcacctgcgctcgccgctgtaggcgctgggcatgctctggcaccgcctcaaagagctggtctgatcaatcgcgccagaacggtttcagcccctcgtcgcgtgcctgctcagcggtcagcccgacgtcgcgcaattgctccctggtcaggtgcaataaagccttgcgcgtgtggcgacggtgccagaacagaccccagcgactgatatcgcgcggcgccgtcgcccgctcctgcccagcctccagttcctgactgtgtaacgccagccgcacatcgctcatgccgttcattttgctgcccctcagttgcttgttgccttgagtgaccagcatgagcgcgcggccaaaaccattacagattcaaccctgccttattaaatccatacagatgctgcctttggacggctgaatcctgtattttctgcctatctgtaatggtcactcgggagcgaccgccatgaccctgtacataaacctcgccgaattgctgggtacccgcatcgaacaaggtttctatcgccccggtgatcgactgccttctgtacgggccttgagcgtggaacatggggtcagcctgagcaccgtgcagcaggcttatcggttgctggaagacaacggcctggcgatgcccaagccgaaatccggctacttcgtacccgtcggccgcgagttaccggccctgcccgaagtcggtcgtccggctcagcgccccgtggacatttcccaatgggaccaggtgctggagttgatacgcgcaacgccgcgcaaggatgtcatacagatgggtcgcggcatgccggatgtattgtcgcctaccttgaaacccctgttgcgcagcctggcgcgcgtgagtcgccgccaggatctgccgggcctgtattacgacaacatcctcggctgtatggagctgcgcgagcaaattgcgcgtctgtccctggattccggctgccaactgacggccgaggacatcgtgatcaccaccggctgccatgaggcgttgtctgccagcatccatgccatctgtgagccgggcgatatcgttgcggtggactcaccgagctttcacggcgccatgcagacgctcaagggcctgggcatgaaagccctggaaatccctaccgacccgatcaccggcatcagcctcgaagcgttggagctggcgctggaacagtggccgatcaaagtcatccagcttacccccaactgcaacaaccccctgggctacatcatgccggaggcgcgcaagcgggcgttgctcaccttggcacagcgcttcgacgtggcgatcatcgaagacgatgtctacggcgaactggccttcagctacccgcgcccgcgcaccatcaagtcgttcgacgaagatggccgtgtgctgctgtgcagctcgttttcgaaaaccctggcacccggtttgcgcattggctgggtggcaccgggccgatacctggaacgggtgctgcacatgaaatacatcagcaccggctccacagcgactcaaccgcagattgccatagccgagtttctcaaagggggccacttcgaaccgcatttgcggcggatgcgcactcaataccagcgcaatcgcgacttgatgctcgattgggtcagccgctacttcccgacgggcacccgtgccagccggccacaaggcagcttcatgctgtggatcgaactgccggaaggttttgatacgttgaagctcaaccgcgtcctcgtggaacaaggcgtgcaagtagcggtaggcagtatcttttccgcttccggcaaataccggaactgcctgcgcatgaactacgctgccaagccaaccgcgcagattgaagaggccgtgcgcaaggtcggggctgcggcgatcaagatgctggcggagacggccgactgacctttaccggaaatttgccgtcatatgccgacaaccgccctgatctggaagccgatcccttgatgattcaacggctattaccgttttgcctgttaggggccctggccctgggcggctgcgccagcgtgagcacgccgcgcgtccccagcgacgccctgcctgccgcgcaatcgtcgttcggccgctcgatccaggcccaggccgcgccctatcaggggcgctcgggctttcgcctgctgcccaacagcagcgaggcgttcatggcccgcgccgagctgatccgcaacgcccagaccagcctcgacctgcagtactacatcgtgcacgacggcatcagcacccgcatgctggtggacgaactgctcaaggccgccgaccgtggcgtgcgcgtgcgcatcctgctggacgacaccaccagcgacggcctcgaccagatcatcgccaccctcgcggcccaccccaagatcgagatccgtctgttcaacccgttgcacctggggcgcagcaccggcgtgacgcgggccatgggccgcctgttcaacctgtcgctgcaacatcgacgcatgcacaacaagctgtggctggcggacaacagcgtggctatcgtcggcggacgcaacctgggggatgagtatttcgatgccgagcccaacctgaacttcaccgatatcgacatgctcagcgtgggcccggtggccgagcaactgggtcacagtttcgaccagtactggaacagcgcgctgagcaagcctatcgatgacttcatctccaacgcgccgtccaagggcgacctcgccgccgcgcgcgtaagcctggaagcctccctggccgagtcgcgccagcagaaccacgcgttgtacaaccgcctgcgtacctacaagacccaaccgcgcatggacacctggcgccgcgagctgatctgggcctggaaccaggcgctgtgggatgcgccgagcaaggtgctggccaaggccgacccagaccctcggctgctgctcacaacccaactggcgccggagctggagggggtcaatcacgagctaatgatgatttctgcgtacttcgtgccgggacagccaggcctggtgtatctgaccgggcgcgccgatgcgggcgtgtcggtgagcctgctgaccaattccctggaagccaccgatgtgcccgccgtacacggcggttacgccccctaccgcaaggcgctgctggagcatggggtgaagctctacgagctgcgccgccaacccggggatggcggcggcagtggcccgcacctgtttcgccgaggcactttccggggctcggattccagcctgcacagcaaggcgatcatctttgatcgggagaaatcctttatcggctcgttcaacttcgacccacgctcggtgctgtggaacaccgaagtcggtgtgctggtcgacagccccgagctggcggaacatgtacgcaacctggcactgcaaggcatggcgcccgccctgagctatgaagcgaaattgcaggacggccaggtcgtgtgggtgaccgaagataacggccagttgcacaccctgacccgcgagcccgggagctggtggcgacggttcaatgcgtggtttgccaccagtgttggccttgagcgcatgctctaggccgcttgtgccgcaccgaatgcgccctggcgcagcagcaacatcaccaggccaagcgcaccggccgccatcagcagcggcagcgcatgcccgctgatccactggctacccgcccctgccaccaatgggccgatcaggcagccgataccccacagctgcgccacgtgggcattggcgcgcaccagcgcgtcgtcgcggtaacgctcgccgatcaagatcaacgacagggtgaacaagccgccagcacttgcgccgaacacgacccagatcggccagatcattggcgtgtgcatcaataacggaatcgccaggctcgacaccagcaacagcagcgcacaccccaggaacaacgtgcgccgcggcaagtagtcggccagtgcaccgatgggcaattgcagtaatgcgtcgccaaccaccaccgtgctgaccatggccaaggcgatctcggcggtgaacccttgttgcaggcagtacaccggcaacaacgtcaggatcatcgcctcgaacgcagcgaacagcgccaccgcccaggcaatcgctggcaggctccggcagaagcgccacagttgcgcgaacgtcacgctgaaggattcggcgctcggtgcaccggaacgtcccagcagcaacagcggcgcaaccatcaacaggccgacacccacccagaaaccgtagtcatgatcggtgccgatcaagcctaacagtaacggacccgacagctggctcaaggcatagctgcagccgtacagcgccaccagccggccgcgccactgctccacaaccaactggttgatccaactctcgccgaggataaacacgatggtcaggatcacgccgatcatcaggcgcagcaccagccacaccgggtagctgggcaggatcgccagcaggccgatggacaccgcgcccgcccacaggcacaggcgcataaggttggcggtgccaagccatgaggccaggcgactggaaaccttcgcgccgagcaatacgccaaaggccggcatcgctgccatcacgccaatcgcgaaactgccgtagccccagctttccaggcgcaaggacaccagcggcatgctgacgcccagggccaggccgacgctgagcaccgaggccaggacggcgaaataagtcgcccaacgcatttccacgctcctgtggatcatttttaagttcacacaaaccagtgtgggagggggcttgcccccgattgcggtgggtcagtgagcaccgctggcgcctgacacactgctatcggggggcaagccccctcccacatttaacctgcggtgctgcttagagcttgatccaggtcgccttcaactcggtgtatttgtcgaacgcatgcagcgacttgtcacgaccgttgcccgactgcttgaagccaccaaacggtgcggtcatgtcgccgccatcgtattggttgacccacacgctaccggcgcgcagggccttggcggtcaggtgcgccttggagatgtccgccgtccacactgccgcggccaggccgtagatggtgtcgttagcaatggcgacagcctcttcggcgctgtcgaaggtgatcaccgacaggactgggccgaagatttcttccttggcgatcttcatcgcattggtcacgccatcgaaaattgtcggctcaacataggtgccgccggtttcttccagggtgcgcttgccgccggcgaccaacttggcgccgtcggcatggccggcttcgatgtacgagagcactgtgttcatctgctgggtgtccaccagtgcaccgacgttggtcgcagggtccagcgggttgcctggtttccagcccttgagggcctcgatcaccagcggcaggaatttgtccttgatggagcgctccaccagcaggcgggaaccggcggtgcagacctcgccctggttgaaggcgatggcgccggcggcagactcggcagcggcttgcaggtccggagcatcggcgaacacgatgttcgggctcttgccgcccgcttccagccagacacgcttcatgttcgattcgccagagcggatcaacagttgcttggcaatcttggtggagccggtgaacaccagggtgtcgacgtccatgtgcagcgccagcgcgttgcccacggtatggccgtagcctggcagtacgttgaatacaccttgtggaataccggcttcaacggccagtgccgcgatgcggatggcggtcagcggggatttttcggacggcttgaggatcaccgagttaccggtggacagcgcaggccccagcttccagcaggccatcatcaacgggaagttccacggcacgatggcgccgacaacacccacgggctcacgggtcaccaggcccaattggtcgtgcggggtcgcggcgacttcgtcgtaaatcttgtcgatggcctcgccgctccagctcagggcattcgccgcgccgggtacgtcgatgttcagggagtcgctgatcggcttgcccatgtccagggtttcgagcagcgccagttcttcggcattggccttgagcaacgcagcaaaacggatcatggcggatttgcgcttggccggcgccaggcgcgaccacacgccggaattgaaggtggcgcgggcgttttcaacggcgcgttgggcgtcggcggcgtcacagctggcaacagtggccagcaggcgaccatcgaccgggctgatgcattcgaaggtgtcaccggaaacagcggcggtgtactcgccattgatgtaggcgcggccttcgatcttcagatccttggcacgttgttcccagtcggcacgggtcagggtggtcatgcgagtgtcctcctcttattgaatacaagggccacgggatatcccacagcagccttaaagaattcttgcccgccagccaatggttcggcgcaaggcagctgccaccctaaaccagcggctgggggtgtttcaatatatttgacataacgccggcaaacgcccttgcgatgttcattttaataaacatagactttgggctctccaaccgcaggccagacgggacacgcacatgagcatccaggacatcgtcgacttcagccaagccaagaccgccgccgagcgctaccgccctgccgccgagaaaatcctcaagggcgatcccgagcaaacgatctacaaccactacaacagcccctgcggccagatgagcgcgggcgtgtgggaaggtgaagtcgggcagtggacggtcaattacaccgagcatgaatactgcgaaattgtgcagggcgtgtccgtgctgcgtgatgccgacggcaacgccaagaccttgcgcgctggcgaccgcttcgtgattcccgccggtttcagcggcacctgggaagtgctggaggcgtgccgcaagatttacgtggtgtttgaacagaaggcctgatcaagacggcgggacgcggagcgtccgaggcgtcgttcccacgcagagcgtgggaacgatcaggcaaaaaaaagcccggatcgtgagatacgggctttttttcacaaggaggaaaatcaattacttgattttgccttctttgtagatcacgtgcttgcgaacgcgcgggtcgaacattttcttttcgagcttgtccggggtagtacgcttgttcttgtcggtagtgtagaagtgaccagtaccggcgctagagatcattcgaatcaattcacgcatgatatagctccttagattgtgccagcgcggcgcaattcagccagcacgacagtgatgccacgcttgtcgatgatgcgcatgcctttggcagatacgcgcagacggacgaaacgtttctcttcttcaacccagaagcggtgatgctgcaggttcggcaggaaacgacgacgggttttgttatttgcgtgggaaatgttattcccagtcaccggacccttaccggtaacttgacagactctcgacatgcctcagccctctaaaaccacatgcccaacccggcatgggttggccgcttaatctctcagtcatttggcgccaggcgccgcgtttctttagggtcttaccggctacacctacaagcgaaggaaccgggcccctagaaaagagcgctgctttataccagaaagaccccagtgcaacaacagcccgcgtgtttttactggcgtaaatcttggcggcagacgcctgaaccgttgccaggaggggccgctgtcacagccgaccgctcgtcgcacagaatgatttacagcgcgcgcgggcacagtgaagtgcacgacgaaacgcactgaggcgccatcaaaacagcatttggcgcaaaagcacaggcaaaaatgggctagtcatttacctatcagaccactacggtaggacttttccagactgcactcgcagatgggccttcgatctgcaaaggaaaccgaacatgcgcctcgctgccctaccgctattgctagcccctctctttatcgccccgctggcctctgccgccagcaccttgagcgtctgcaccgaggccagcccagaagggttcgatgtggtgcaatacaactcgctgaccaccaccaatgcctcggccgacgtgctgatgaaccgcctggtggactacgacgcgaccagcggcaagctggtgcccagcctggcggacagctgggacgtctcgccggatggcctgacctataccttcaagctgcacccggatgtgaaattccatcgcaccgagtacttcaccccaagccgcaccctgaccgccgaagacgtgcgtttcagcttcgagcgcatgctcgacccggccaacccctggcacaagatcgcccagagcggcttccctcacgcccagtcgctgcaactaccgacgctggtaaaaaagatcgacgctctcgacccactgaccgtacgtttcaccctggatcacgccgactccaccttcctcgccgcgctgagcatgggcttcgcgtcgatctacccggccgaatatgccgacaaactgctcaaggccggcacgccggagaaactcaacagccagccgatcggcactggaccgtttatcttcagccgtttccagaaagatgccgtggtgcgctacaaggccaacccggactacttcgccggtaaaccggctgtggataacttgatcttcgccatcacgccggacgccaacgtacgcctgcagaaactgcaccgcgacgagtgccagatagccctgtcgcccaagccgctggacgtgggtgaggccgaaaaggacccggcgctcaaggtggagaagaccgctgccttcatgaccgccttcgtggccatcaacagccagcacccgcccctggacaagcccgaagtccgccaggcgatcaacctggcgttcgacaaggggagctacctcaaggccgtgtttgaaggcaccgccgaggccgccaacggcccgtacccacccaacacctggagctacgccaaggacctgccgggttatccacaggacctcgccaaggccaaggcgctgctcgaccgcgccgggctcaaggacggcttcaagaccactctctggacccgccccaccggcagcctgctgaaccccaacccgaaccttggcgcacaactgctgcaggctgacctggccaaggtcggcatccaggccgagatccgcgtgatcgaatggggcgaactgatccgtcgcgccaaagccggcgaacacgacctgctcttcatgggctgggccggtgacaacggcgacccggataacttcctgaccccgcagttttcctgcgcggcggtgaaatcgggcaccaacttcgcccgctactgcgacccggcgctggacaagctgatcagcgcaggcaagaccaccagcgagcaaggcgtgcgcagcaagctgtaccaacaggcccaggcgcagatccagcaacaggcactgtggctgccactggcccacccgactgcatttgcgctggcccgcaaaaatgtcgtgggttatcaggtgagcccgttcggacgtcaggatttctcgaaggtcagcgtccagccctgagctgaaagctgcaagcccgcttgaggcttgcagctgctcccctcctacatccacccgtattccgccatcgacaacggatcgccatcccccacgataatgtgatccagcacccgcacgtccaccacttccagcgccttctgcagcaacttggtcaattttcgatcagcggcgctcggctccaggctcccggaaggatggttatggcacaggatcaacgccgccgcgttgtaggccaaagcgcgcttgaccacctgccggggatacaccatcgccgcgtcgatggtgccttgggacaacgcctcgaagcccagcaccctgtgccttgaatcaaggaacaggcagccgaagatctcatgaggctcatgacgcagcatggccttcaggtagtcccgcacggccaccgggctttccagcaccgagtcgcttcgcaggcgctcggccatgtgccgcttggccatttccagcaccgcctgtaactgggcaaacttcgccggccccaggcccaattgttggttgaacaatgtttggctggcctccagcaacgggcgcaatccaccgaattgcgccaaaagatggcgcgccaggtccaccgcgctcctgccggaaaccccggtacgcaggaagatcgccagcaactcggcatccgacaggctcgccgcgccccactccaaaagcttttcccgcggccgctctgccgccggccaatcacgaatactcatccctcctccctctccctgtatgccatgcgtatcgctgttgcctcgcggacgctgtgttatcgtaggccctcttttttgcaggcgatttcccctggggagggggcatcgcaggcgtcattgaactggcaacactgaactggaaaggcaaaccaatgcagcgtctgtatcggaaacgcatcgttctcggcgttggcggcggcattgccgcctacaagagcgcagagctggtccgcaggctcctggaccagggcgccgaagtgcgcgtggtcatgacgcgcggtggcagtgaattcatcaccccgctgaccatgcaggccttgtccgggcacccggttcacctggacctgctggaccctgcggccgaagccgccatgggtcacatcgagctggccaaatgggccgatctggtgctgatcgccccggccaccgccgacctgatcgcgcgcctggcccaaggcatcgccgatgacctgctgaccactctggtactcgccaccgacgccaccgtcgccatcgccccggccatgaaccaggccatgtggcgcgaccctgctacccaggccaacacccaacttctgcaaagccgaggcctcaaggtgttcggcccggcatccggcagccaggcctgcggcgacgttggcatgggccgcatgctcgaagccacagacctggcgctgtgcgccgccgagtgcttccagcacctggccctcaccggcaagcacgtgttgatcaccgccggcccgacccaggaaaacatcgacccggtgcgctacatcaccaaccatagctcaggaaaaatgggctttgccctggccgaagcggcggtcgaggcaggcgcacgcgtcaccctgatcaccggcccggtgcatttgccgaccccggatcgggtcacgcgaatcgacgtcgtcagcgcccgcgacatgctggcggcctgtgaggcagccattccgtgcgacctgttcatcgcctcggcggcggttgcggactaccgcccggaagtcgttgccccgcaaaagctcaagaaagaccctacgagcggagacggcctgctcctgcaaatggtgcgcaacccggacatcctggccaccatcgccacgcgcccggaccgtcctttcagcgtcggtttcgccgccgagaccgagcatttgctggactacgccgcacgcaaattgaaagacaagaacctcgacctgatcgttgccaatgatgtcgccaacccgagcatcggcttcaacagcgaggaaaacgcctgcagcgtgatcgaccgcgacctgcacgccacccttttcgcccagaccagcaagggcaagattgcccgccaactgatctcttttatcgcccaacggctgaaccaggtttaatttccatgcacgctttgcaagccaagatcctcgacccacgcatcggcagcgaattcccactgccggcctacgccaccccgggctccgcaggcctcgacctgcgcgccatgctcaagcaagacaccgtccttgaaccgggccagaccatcctgatccccaccgggctgtcgatctacgtgggtgaccctggcctggcggcgctgatcctgccgcgctcgggcctgggccacaaacatggcatcgtgctgggcaacctggtcggcctgatcgactcggactaccagggcgagttgatggtgtcgtgctggaaccgtggccagaccgcgttcaacatcgccgtcggcgagcgcattgcccagttggtattggtgccggtggtgcaggcgcacttcgaactggtcgaggagttcgatgaaacccaacgcggcgcaggcggttttgggcattccggcagccattgattgttcctacgcgcgtgcctcggtgctgccgttatgcttttaaggaacatgacggggattgcgctttatgacgaacgattcgcgaataaaacggcaccatgccgctggtcacgcctccatcacccataacagcttgaaacccgggctgttactggcggcaaccagcgtgatcgccgccggtgcgctgttctggtttggcgcgtgggtgccactgcacaacgaataccgccagcacgttgcgcaatccgccgctgcgattatcagcaagtccgtcgcaacggccgccgataaactcgcactgcaagccgagatcaacgccaaaaccccggcactcgcgaacgctgtccggtccaatcgaccggatatccggcaggccgcagaacaccatctacccgcacgggaggggttgaccagcacttggctcaccccccttcgccaagcgcccctgggcgatagcctgccgcctcaggtgctggacatgattggtcgcgcggagcgtaacgtgccgccaataccggaaatttacaaaagtggcgaccgttggcttttctatagcgtaattgccttgcgcgaagccacgcacgccccgatcatcggcaccctgacccaggcatacgacctccagccattgaccgaacaactggcgtcgctgcccccagaggtgggaacctttcgtttgtcccagcgcgtctggaacgatcccgagcaggtgatcttcacccagggccacagcgcgtcaccagacacctacacgcttgccgtaggcgataatcatctatcattgagcttcagccccggggcgctgtatcagttcgcttacccccgtcagcagcttgtgttgatggcgttggccgcgctacttgccctggtgggtgccatggcaggcgtatacctgtgcttcaggcggtcccaaatgttaatcaacaacggctgtggaataggtacagccccacgccacgaactctcctcccaaaatgccgtccaagccccaggcatgaccccactggtcagtccccaggatctttcaagacaggagcccccccaagccatgagcaatccagcccgtgtagccccgatcttccccgacagtatcttccgcgcttatgacatccgtggcgtggtgcccaaaaccctgaccgccgaaaccgcctactggattggccgggccattggcgcccagagcctggcccaggacgagcccaacgtgtcggtcggccgtgacggtcgcctgtccggcccggagttggtggaacaactgatccagggcctggccgacagcggttgccatgtgagcgacgtgggcctggtgccgacgccggcactgtactacgcagccaacgtactggctggcaagtccggggtgatgctcaccggcagccacaacccgtcggactacaacggtttcaagatcgtcatcgccggcgacacgctggccaacgaacagatccaggccctgcacgaccgcctgaaaaacaacgacctgaccagcggcaagggcaccgtcaccaaagtcgacatcctgcaacgctactctgatgaaatcaccggtgacgtcaaactcgcgcgccgcctcaaggtggtggtggattgcggcaacggcgcggcgggcgtgatcgccccgcagttgcttgaagcgctgaattgcgaagtgatcccgctgttctgcgaggtcgacggcaacttccccaaccaccacccggatccaggcaagccggagaacctggtggacctgatcgccaaggtcaaggaaaccggcgctgacgtgggcctggcctttgacggtgacggcgaccgagtgggcgtggtgactgaaaccggcgagatcgtgttcccggaccgcctgttgatgctgtttgcccgtgacgtggtggcgcgcaatgccaacgccgagatcatcttcgacgtgaagtgcactcgccgtctcaccccgctgatcaaggaatatggcggtcgcccgctaatgtggaagaccggtcactcgttgatcaaaaagaaaatgaaggaaaccggcgccctgttggccggcgaaatgagcggccacgtgttcttcaaggagcgctggttcggctttgacgacggtatttacagcgccgcgcggttgctggagatcctcagcaaggaaaaatctaccgcagaagagctgttccagaccttcccgaacgatatttctacgccagagatcaatatccatgtgaccgaggagagcaaattcagcatcattgacgcactgcacgatgcgcaatggggcgaaggcgccaacctgaccaccattgatggtgtgcgagtcgattacgccaaaggctggggcctggttcgcgcgtccaacaccacaccggtgctggtcctgcgtttcgaggcggataccgaggctgagttgcagcgcatcaaggacgtgttccacgcccagttgaaacgtgttgcccctgatctccaattaccgttctgattttttaccggagccctgaatgaccctcgaacgcgaagccgctgccaacactgccaaggtcctgtccgaagcgttgccttacatccgacgctatgtcggcaagacgctggtgatcaagtacggcggcaatgccatggaaagcgacgagctgaaaaccggctttgcccgcgacatcgtgttgatgaaagccgtggggatcaacccggtggtggtgcacggcggcggcccgcaaatcggcgacctgctcaagcgcctgtcgatcgagagtcacttcatcgatggcatgcgcgtcactgacgcgcagaccatggacgtggtggagatggtcctcggcggccaggtcaacaaagacatcgtcaacttgatcaaccgccacggcggcagcgccatcggcctgaccggcaaggacgcggagttgatccgcgcgaaaaagctgacggtgacccgtcagacaccggagatgacccagccggaaatcatcgacatcggccaggtgggcgaagtggttggcgtgaacaccgacctgctgaacctgctggtcaagggcgacttcatcccggtgatcgcgccgatcggcgtgggcgccaatggcgagtcctacaacatcaacgccgacctggtggccggcaaggtggccgaagcactgaaggctgaaaagctgatgctgctgaccaacatcgccggcctgatggacaagcaaggcaaagtcctgaccggcctgaccacccaacaagtggacgatctgatcgctgacggcactatctacggcggcatgctgcccaagatccgctgcgcgctggaagcggtgcaaggcggggtgggcagctcgttgatcatcgatggtcgagtgccgaatgcggtactgctggagatcttcacggataccggcatgggtacgttgatcagtaaccgcaaacggccttaagacaccagaaaacaaaaggccccgttcaatctgattgagcggggccttttttgtgcttgaacacactgtagatccaaatgtgggagggggctttcccccgattagcggtgtatcagccaaataactgcaactgacactccgtcatcgggggcaagccccctcccacactagcctttacacacaagggagctcggggtcagacgccaaactgctcgcgatatgcacgcaccgccggcagatgctgcttgagctgcggatcatcttccaggaactgcaacacctggttcaacgagacgatgctcacgactggaatgccgaaatcgcgctccacttcctggatggccgacaactcaccgttgccacgctcctggcggttcagcgcgatcagcacgccggcggccttggcgccgtcctgggaagcaatgatctgcatcacttcgcgaatagcggtgccggcggtgatcacgtcatcgatgatcagcacatcgcccttgagtggagcgccgaccaggctgccgccttcaccgtgggccttggcctctttacggttgaagcaccaaggcaggtcctgcccgtgatgctcagccagcgccacggcggtcgccgccgccaggggaatacccttgtaggccgggccaaacagcacatcgaaggaaataccgctctcaacgatggcagccgcatagaaacgacccagctgagccagggccgaacccgagttgaacagacccgcattgaagaagtacgggctggtgcgtcctgacttgagggtgaactcaccgaagcgcaaaaccccgcgatcgatggcaaaacgaatgaaatcgcgttgatacgcctgcatgaaaaaagcctcagataccacggatttagctaattaggtagacggcgtgtatcatacacgcacgcgatttttggggccatttatgcggatcatcagtgtgaacgttaatggtattcaggctgcagtcgagcgtggtttgctcagttggctgcaagcccagaatgccgacgtcatctgcctgcaggatacccgcgcctccgcctttgaactggacgacccagccttccaactggatggctacttcctttatgcctgcgatgccgaagtgcccacccaaggtggcgtagctttgtattcgcggttgcaacccaaggcggtcatcagcggcctcggcttcgagacagccgaccgctacgggcgctacctgcaagccgatttcgacaaggtcagcatcgcgaccttgctgcttccttcggggcagaacggcgatgaagacttgaaccagaagttcaagctaatggacgatttcgcccgttacctggataaacagcgacgcaaacgtcgcgagtacatttattgtggctcgctgtacgtggcgcaacagaagctggatatcaagaactggcgcgacagccagcaatccccgggcttcctggcgccggaacgggcctggatggacgagattgtcggcaacatgggctatgtggatgccctgcgcgaagtcagccgcgaaggcgaccagtacagctggtggccggacaacgaacaggctgagatgctcaacctgggctggcgcttcgactaccagttgctgaccccgggtctgcgccggttcgttcgcagcgcacgcctgccgcgccagccgcgcttctcgcagcacgcgccgctgatcgtggactacgactggacactgaccatctgaggtcttttcccaggcacaaaaaaaccgacatcgctgtcggtttttttgtgggtgctcattatttgatcacacgccaggtcaagggatagcggtaggcgatccccttgttggccttgatgctgccaatgatggtcagcaccaccgtggcgatcgccagggcgaacatcaggaaaaaaccaatcaccgcgaaagccagcaccatgcaagcgatccaggcgatggcgacggtgatctggaagttcagggcttccttgccctgatcatcaatgaacgagtccacttctttcttcatctgccataggatcagtggccccacgacgctgccgaaggggaacacaaaccccagaaaagccgcgagatgacacaacatcgcgccctggcgcacttcgtaggaaggtgtcggcaccggcatttggctgttgtcattcatggcgattctccttgagacgggctcagtcagccagggcggcgttctgcagttcgaagatctcggtcatgcctttctgggccagggccagcatcgcgttcagttcggccggctggaatggcgcgccttcggcggtgccctgcacttcgatgaaaccaccggtgctggtcatcaccacgttcaggtcggtctcggcagccgagtcttccaggtagtccaggtccagcactggctcgccctggtacatgcccaccgaaacagcggcgatcatttgcttgagcgggtcaccgcccttgaggccgccacgcttcttgatcactttcagcgcgtcaaccagggccaccatggcaccggtgatggacgcagtgcgggtgccaccgtcggcctggatcacgtcgcaatcgacgtacagggtcacgtcgcccagcttggacatgtccagggctgcgcgcagggaacgaccgatcaggcgctggatttccagggtgcggccgccttgcttgccacggctggcttcacgctggttacgctcgccggtggcgcgcggcaacatgccgtactctgcggtcagccaaccctggccctggcctttaagaaagcgcggtacgccgttttcgacgctgacggtgcagatcaccttggtatcgccaaactcgaccagtacggatccctcggcgtgtttggtgtagttgcgggtgatgcggatcgagcggagctgatcggcagcgcgaccacttggacgtttcataggggatacctgtactgaggacgaaaaactgccgagcattatagagccgcgggccgattcggggcactgctaaaaaatccggttacgaatgcccgggtttgggcgcactcgccccactgcgctacaatcctgcgccttcccaatcatcagcccgcatttacgggactgcaacgcgaggtacctccatggtgcacagcatgaccgcctttgcccgcgtcgaaaaagccggcgtacaaggcaccctgagctgggaactgcgctcggtcaacagccgctacctggagccgcatctgcgcctgccggagtcgttccgcgacctcgaaggcgctgtgcgtgaagcgctgcgccagggcatttcccgtggcaagctggaatgcaccctgcgctttaccgaagaaaccaccggcaagccgctgcaggttgaccgcgaccgcgccgcgcaattggtcgccgccgccgaaaccatcgccggcctgatcaagcagccggccgcgctcaaccccctggaagtgctggcctggcccggtgtgctggtggccgacgccaccgacccgcaagcgctcaacgccgaagccctcgccctgttcaatcagggtttgaaggagctcaaggccggccgcgagcgtgaaggcgccgagttggcccgcctgatcagcgagcgcctgacctcgatcgaagaagacgtggtcaccctgcgcgagctggtcccgcagatgcttgccgcccagcgccagaaggtcctcgaccgcttcaccgacatgaaggccgacctcgacccggtgcgcctggagcaggaaatggtactgctggcgcaaaagagcgatgtggccgaagaactggaccgcctgagcacccacatcctcgaagtacgccgcgtgctcaagtccggcggcgccgccggtcggcgcctggacttcctgatgcaggaactcaaccgcgaagccaatacactgggctccaaggctttcgatccgcgcagcaccacggctgcggtcaacctcaaggtgttgatcgagcagatgcgcgaacaagtacagaatattgagtaaggcaacctccatgacccacagcaccggcaccctttacatcatttccgctccttcgggcgcgggcaagagcagcctggtcaaggccctgaccgacgctgacgagcagatccgcatctcggtctcccacaccacccgcgccatgcgcccgggcgaggtgaacggggtgcactatcacttcgtcgagcgcaccgagttcgtcaagatgatcgaacacggcgacttcctggagcgcgccgaagtgttcggcaacctctatggtacttcgcaaagccacttgcagcagaccctggacgaaggccacgacttgatcctggaaatcgactggcagggtgccgaacaagtgcgccagctgatgcccaaggcgcgttcgatctttatcctgccgccgtcgcttgaagcgttgcaccagcgcctgaccaaccgcggccaggacagtgacgagatcatcgaaggccgcatgcgtgaagccgtcagcgaaatgagccactacgtcgactacgactacttgatcatcaacgacgatttttcccacgcactggatgatctgaaggcgattttccgcaccaatcagctccagcaaaagcgtcagcaacagcgttttggcaaattgctggccgaactgctcggttgattggctcttcccaaaaccgctgcaagggctttacattggcacttgtagcggttttgcgagggcctgcgaaaaatcagcgcttccctaaacgctggtgattttttaaactgtttagtccgctcgcccaaccgggcagcgcgcatcttgcattcgctccgaggaataccatggcccgcgtaaccgttgaagactgcctagaacacgtggataaccgctttgagctggtcatgctctctaccaagcgtgcccgtcaactggccactggcggcaaagagcccctggtccagtgggaaaacgacaagcctaccgttgtcgccctgcgtgaaatcgctgaaggcctgatgagctacgagttcatcgccaacgccgaaatcgttgaagacgaaccgctgtttgcagcgttcgaggacgagtccaacgaggccgtctaagcctatgcctggtcgacgtagcacggcgcggggtcacagccaacggcaggagttcacactttgccgagcatagacgccctcgccgatcgcttatcggcctacctcggcccagaccaggtcaacctggtccgccgagcgtatttctacgccgaacaagcccacgacggccaacgccgccgcagcggagaggcgtatgtcacccatcctcttgcggtggccaacattcttgccgacatgcacatggaccatcagagcctgatggccgcgatgctgcatgacgtgatcgaagacaccggcatcgccaaggaagcgctcagcgcgcaattcggcgaaaccgtggccgaactggtcgacggggtcagcaaactgacccagatgaacttcgagaccaaggccgaggcccaggcggaaaacttccagaagatggccatggccatggcccgcgatatccgcgtgatcctggtcaagctggccgaccggctgcacaacatgcgtacgctggaagtgctctccggcgaaaaacgccggcgcatcgccaaggaaaccctggaaatctacgcgcccatcgccaaccggctgggcatgcatgccattcgtatcgagttcgaagacctcggtttcaaggccatgcacccgatgcgttcggcacgcatctaccaggcggtcaagcgcgcccgtggcaaccgcaaggaaatcgtcaacaagatcgaagaatccctgagccattgcctggcgatcgacgagatcgagggcgaagtcagcggccgacaaaagcacatctacggcatctacaagaagatgcgcggcaagcgccgggccttcaacgagatcatggacgtgtacgcgttccggatcatcgtcgacaaggtcgacacctgttatcgcgtactgggcgctgtacataacttgtacaaacccctgccgggtcgcttcaaggattacatcgcgattcccaaggccaacggctaccagtcgctgcataccacgctgttcggtatgcacggggtgccgatcgagatccagattcgcacccgcgaaatggaagagatggccaacaacggcatcgccgcccattggctgtacaagtccagcggcgacgagcagcccaaaggcactcatgcgcgcgcccgccagtgggtcaagggcgtgctggaaatgcagcaacgcgccggcaactccctggaatttatcgaaagcgtgaagatcgacctgttcccggacgaggtctacgtgtttacgcccaaaggccggatcatggagctgcccaagggctccaccgccgtcgactttgcctatgcagtgcacaccgatgtgggcaacagctgcatcgcctgtcggatcaatcgtcgtctcgcaccgctgtccgaaccgctgcaaagtggctccacggtcgagatcgtcagtgctccaggcgcacggccgaacccggcgtggctcaacttcgtggtcaccggcaaggcgcgcacgcacatccgtcacgcgctgaaattgcagcgccgctccgagtccatcagcctgggcgaacgcctgctgaacaaggtgctcaacggtttcgacagcgctctcgacaagatcccgcaggaacgcgtacaagcgatgctccacgagtaccgtcaggaaaccatcgaagacctgctggaagatatcggcctgggcaaccgcatggcctatgtagtcgcccgccgcctgctcggcgaaggcgaacagctgccaagccccgaaggcccgctggcgattcgcggcaccgagggcctggtgctcagctacgccaagtgctgcacgccgatcccaggcgatccgattgtcggccacttgtccgcaggcaaaggcatggtggtgcacctggacaactgccgcaacatcaccgaaatccgccacaacccggaaaaatgcatccagctctcgtgggccaaggatgtcaccggcgaattcaacgtcgagttgcgcgtggagctggaacaccagcgtggcctgatcgccctgctcgccagcagcgtcaacgcagccgacggcaatatcgagaaaatcagcatggacgagcgcgatggccgcatcagcgtggtccaactggtggtcagcgtccacgaccgcgtgcacctggcccgcgtgatcaagaaactgcgtgccttgaccggtgtgatccgcatcactcgcatgcgcgcctaacccacattacaaggagtcattcatgaccaagaccgttatcaccagcgataaagcccctgccgccatcggcacttactcccaggcgatcaaggcgggcaacaccgtctacatgtccggccagatcccgctggacccaaagaccatggaactggtggaaggcttcgaagcacagaccgtacaggtcttcgaaaacctcaagtccgttgctgaagccgccggcggttcgttcaaggacatcgtcaagctgaacatcttcctcaccgacctgagccacttcgccaaggtcaacgagatcatgggcaagtacttcgaacagccgtacccagcccgcgccgccatcggcgttgccgccctgccaaagggtgcacaggttgagatggacgcgatcctggtcatcgagtaaaacacccggcgcagcccccacaggctgcgccgacttcgtttcagaaggatttcatgatgcgcaaagcgcttgtagcctcatcaatgctcgccctgttgctcggcggctgtgccagtaaccctgccgacagggatgtgagcggcacctggatcaaccaggtagccatcgatgcggctgccaagggcggccctttgcgtgaagccttgcagagctttggcccgaacctcgagtgggaggtcaataccaaggccgcgcaggcccgctactacaacggttttgaagtagcggaaggcaagttgctgggtgaacagtccggcgcctggagcgtggatttctacggcagctccgccaccgaactcaagcgcaaaggcaagcaactgctgcaagtggccaatgacaacgagcctgaacagctgtttgcccgcgccaaagaccccgccccggaaggcgcacctttgggcgccaacttcgagcgggcgctgtacgcggcctacctgggcggtgactggaagatcagcgacggcttcggcagcggcgccatcgtgcagttccaggctgacggcaaagtcgccggcctgcctaatgttgaccggtactcgctatgcctggccggtgattgcgcgtcaatgagcggcggctacgacagcatctggctgcaactcaatggccagggcaacccgtggatctttgtgcgcaagggcaagcaactggagattttccaggcggtgaataccgcgcaggccgacgaggtgccctcatttacgccggggcctcggcagtggctactggaaaaacagtgatacaaagcaaaggagcccaagggctcctttttctttagcctgcaccgcgattggcacgactgaagacattgccccatgcgcacactccttatcctcggcctcttgctgctgagcggctgcatccctgcagatatcagtggtgtctggatcaatcagccaatcattgatgtggccgcgcaaggcaaaccgctgaacatccacggtacgcatttggagtggcacatcgacactcgtgctggcaaggcacaggtgcgtaacggctttgagatgagcgaaggccagttactgctcaaatcccccaacgcctggatcgtcgactacggtggcggtcacaccgatgagctgcaatttgatggcaagtatctgacccaggcgaccaaccaatacgccccacaggaagtgttcagccgcccaaccgaaacggtggagacaggggataattgggtcaacaccttcgtgaaagccctgaacacagcgtacatggccggcgaatggaacatcatcgacggccccgggaaaggcacgacggcgatgttcaccgcgcagggtcgcgtttcagggcttgggcaagcagatcgatacacactgtgcctggacggcgactgccgatcccagggtgcgggcaatgaaaccctgctcttaggccatgcaggcaccgacgatacatggatcttcgtgcgcaaaggcaagcaacttgagattttccaggcggtgaataccgcgcaggccgacgaagcaccgcagttcacccccggcccccgccaatggctgctggaaaaacaatagccgccatgccgcaaatccaaatgtgggagggggcttgcccccgatggcagtgcatcagctaatacaactgtggctgacactccgctatcgggggcaagccccctcccacattttttgactgcgtttcagcccttgaggatcgccgcatagccttcgcgataagtcgggtaggtcggcgtccagcccaacgctttcgcccgggcattgctgcactgcttgctgcccgctcgccgcacactggcgtcctcagcccactcggtcaccccaaggtattcgcgcaaccagcccaccacttcggccagtggcgctggcgcatcgtcgacaccgatgtagaccttgtccagcgaaccgccctcttccacatggcgcaataaaaaggccagcagccccgcagcgtcttccgcatgaatgcgattgccatataaaggtggatcgattgcgactcggtagccctggcggacctgggtcagcaaccattcgcgtcccggaccataaatgccggtcaggcgcacgatgctggccgggatgccgctattgagcgccacctgctcagcctccagcatcacctgcccggaataccccttcgcctgagtctccgatgtttcgtcgacccactcgccattctgctgcccgtagacgctgctgctggatacaaacagcaggtgcttgggctcctggccgtagtcgcccaaccactcaagcacatgtttcagcccttctacataagcggcgcgatagccggcttcgtcgtggtccgtcgcagcggcgcagtacaccaggtaatccaccccgccaatcggccaggtgtctgggcaatccttcttgaacaagtcaccggcaatgccgatcacgccctcaggaagccgcgaaatatcgcggcgcaggccatgaacctcccattccgaggcgagcaactggctagccagccgactacccacatcgccacatccggcaatcacaacagaaggcgctgacatcacaaaactccgcgaagaaaggtctaggttagccttcgcagatgacagacggccagaaaaagcacaaataaagttactgtattacttctgttaacaagaattacttgcaataataaccgcccatttgtcctcgcccccagggtctggaaggacgatcactcatttttttactcaggtccggccagcatgacacgtaatacaacccccgcttcgccaaccaagcttcacagcccatcccgcgcctggcgcgcgattgctgcgctgctgttcagcgtactgctggcaccgaccgccgccttcgctgatgccaccgcgccagccaccccggcggccgccgagcacaacactgcggcaccggcagcaccggcagcacctgccgtagcgcccgctgccaccgacccggcccaggctgctgaccctgccgccgacgacagcggtgtggtgctggaagaagacaacaccctgggcatggcccacgacctgtcgccctggggcatgtaccagaacgctgacgtggtggtgaaagccgtgatgatcggcctggccatcgcctcgatcatcacctggaccatctggatcgccaaaggcttcgagctgctgggcgccaagcgtcgcctgcgcaccgaaatcgtccacctgaaaaaggccaccaccctcaaggaagccagcgaaagcgcgaccaaaaagggcaccctggccaataccctggtgcacgacgcgttggaagaaatgcgcctgtcggccaacacccgcgaaaaagaaggcatcaaggaacgtgtggccttccgcctggagcgtctggtggcggcctgcggccgtaacatgagcagcggcaccggcgtgctggcgaccatcggttccaccgcgccgttcgtcggcctgttcggtaccgtgtggggcatcatgaacagcttcatcggcatcgccaaaacccagaccaccaacctcgccgttgttgccccaggcatcgccgaagccctgctggccaccgccctgggcctggttgccgcgattcctgcggtggtgatctacaacgtcttcgcgcgttcgattgccggctataaggcccaggtatcggacgcgtcggcggaagtcctgctgctggtcagccgcgacctcgatcacctgcctaccgagcgcagctcgcaaccgcacatggtgaaagtggggtaatcggccatgggcctgcatttgaatcaaggcgacgacgaactcgtcgagaaccacgaaatcaacgtcacgccgtttatcgacgtgatgctggtgctgctgatcatcttcatggtggcagcaccgttggccaccgtggacatcaaggtcgacctgcccgcgtccagcgccaagccggcgccacggccggagaaaccgatcttcctcagcgtcaaggcggaccaacgcctgttcctgggcgaagaagaggtcaaggctgaaaccctggggccggtgctcgacgccaagacccagggcaagaaggacacgacgatcttcttccaggctgacaagggcgtggactacggcgacctgatgagcgtgatggatgccctgcgggcagccggctacctcaaggtaggcctggtcggacttgagacggcagccaagaaatgatcacgacgcgccacaaactgacgcgttatggcaccagcctcgccgtcgtactgggcgtgcatgccgtcgcgatcgctatcgcgcttcattggtcggcgccgcgcacggtgcagttgccaccggctgccatggtcatcgacctggcaccgatgccagccccaccgccgccggcaccgcccaaggtggtcacgccgccgcaaccgcctgccccggtggaagaactgccgctgccgaaactggccgaggcacccaagccgacgatccaggtgcccaagccggtcaagcccaagcccaaaccgcagccgcccaagcctgtggagaagaagatcgagccgcccaaggagaaaccttccgaggacccgccgagcgatgctccgccgacccaggcaccggctgaaaaatcggcccagcccgttcctggcccgtcgccgcaacagatcgccgccaaggcgtcctgggaaggcaccctgctggcccacctgcagaagtacaagaagtacccgccaggcgcccaggcgcgtggcaaggaaggcctcaaccgcttgaagttcgtggtggatgccgagggtaacgtgctgtcctacgagttggtgggccgctccggcaacgccgacctggaccgcgccacgctggacatgatccgtcgtgcccagccgctgcccaagccaccggcagacatgctcaagggtggcagcatcgagatcgttgcaccgttcgtgtacaacatcgaaaaacgtcgtcgctgagccgctcccaatgggcaccctcgggtgcccattgcgctccccctccccggtatttcaagccttgcaaacccgcgagctgaaccgttactgaacgtgaaaccaatgtcatggttcttcacttgtaacacttcaatacaccaccaatcatgcgcgaataattctcatttgagaggcttttcgccatgtcctgccctccccgcctgacgcttgccctgctcgcaatcgctggcgccccctgcgcagcccatgcggatcaactggtcagcctgaccgtgcaaaaccacaccttcacacccgccagcttcaccgtgccggctggggagcgctttcgcatccagctcaccaacaacgacgacaccgtcgacgaattcgaaagctacgacatgaaattcgaaaagatcgtcgtgcccggcaacaccattaccgtcttcgccggcccgatgcatccgggcacctacagctttttcgacgactaccaccccgaccaggccaaaggcaccgtcaccgtcgtcgcggccaaggagtaagtcatgctggcctgtctgctgatcgtgtttcgtgaagtcctggaagccggcatcgtcatcggtatcgtcatggccgccacccaggggctggcgcggcgcagtgcctacatcatcggcggcatcgctgccggtgttggcggcgcggcgatcctcgcgctgttcactggcgccatcacccaggccctggacggtttcggccaggaaatcttcaacgccaccatccttatcgtcgcggtgtgcatgctcggctggcacaacctgtggatgagtagccatggccgcgaactcgctactcaactgcgcgaaagcggggcggcggtgcaacgcggcgaaaagaccctgtgggcactggccatcgtgatcaccgtggccgtgctgcgcgaaggctcggaaatcgtgctgttcctgtatggcatcgccgcctccacccacaccgaacccctgacgatgttcatcggcggcgtgctcgggattgccggcggcggcgtgctgtcgtggctgctgtatcgcgggctggtggtgatcagcctcaagcgcctgttctcggtcaccacctggatgatcgccgtactcgcggcgggaatggccggccgcgccgccgcgatcctggccggtatcaacctgatcccggcctggggctacgagttgtgggacacctcttggctagtctccgacgcaagcctcaccggtagggcgctgcaagcgctgactggctacaccgaccgccccctgggcgttcaactgtttgcctgggtggccacccttaccctgctgctactgggtagccgccttgtgcagtcgcgcaccactcaaccgtcttcatccaccctggagcgtcacccatgaaccacctgtccaaacccgtggccgctgcgctggtcctgaccagtgccctggctttttccgccgtcagccaagcccgtgaatacccgatcggcgggccggttcagacccacgacatggagatcgcctcctcgtacctcaccgggatcgagatggcgccaatgccaccaggcatggtcatggacaaggactcggtgcaccttgaaaccgatgtgcatgccaccgccgacaacaagtacggactgtccaacggtgaatgggtgccttacctgagcatctcctattccctggtcaaggaaggcgctccggactacaaacaaatcggcacgctcctgccgatggttgccaaagacggcgcccactatgcgaacaacgtgaagatggacggccccggcacctataccgtggtcctgcgctatgagagcccgcagatcaatggcttcttccaccacgtcgacaaagaaaccggcgtccccgaatggtggggcccgttcaccgagaccttcaccttcaaatacccgcagaaataaccggcaaaacacctgcggcacccgattagctggtgtcgcaaaccccatcgtgtctgataacgtgcgtctatcgattgcagccggtatgcttggcccgcaacctcatggacgcccgctatgactcttacagaattgcgctacatcgtcaccctcgcccaagagcagcacttcggccacgcggccgagcgttgccatgtcagccaaccgacgctgtcggtgggcgtgaaaaagcttgaagacgaactcggtgtgctgattttcgagcgcagcaagagcgccgtgcgcctcaccccggtgggcgaaggcatcgtggcccaggcccagaaggtgctggagcaggcgcagagcattcgcgaactggcccaggccggcaagaaccagctgaccgcgccgctcaaggtcggcgccatctacaccgtcggcccgtacctgtttccgcacctgatcccgcaactgcaccgcgtcgcgccgcagatgccgctgtatatcgaagaaaatttcacccacgtgttgcgtgacaaactgcgcaacggcgagctggacgcgatcatcatcgccctgccgttcaatgaagccgacgtgctgaccctgccgctctacgacgagccgttctacgtgctgatgccggcctcgcacccgtggacccagaaagacaccatcgacgccggcctgctcaacgacaagagcctgctgttgctcggtgaagggcactgcttccgcgaccaggtcctcgaagcctgcccgaccctgaccaagggcaatgacggcgccaagcacaccaccgtggaatccagctccctggaaaccatccgccacatggtcgcgtccggcctgggcatttccatcctgccgctgtcagcggtggacagccatcactacgcccccggcgtgatcgaagtgcgccccctcacgccgccggtgccgttccgcaccgtggcgatcgcctggcgcgccagcttcccacggcccaaagcgattgagatcctcgccgactcgatccgcctgtgttcggtcgccaagccgactgccgcgagctaagccagggtatgactgagctgtcgcaggtgtcggtgacggcactcaagggtgtcggtgaagccatggccgagaagctggccaaggtgggcctggagaacctccaggacgtgctgttccatctgcccctgcgctatcaggaccgcacccgcgtagtgcccatcggccagttgcgccccgggcaggacgcagtggtcgaaggcaccgtcagcggtgccgatgtggtgatgggcaagcgccgcagtctggtcgtacgcctgcaggatggcactggcggcctgagcctgcgcttctaccatttcagcaacgcgcagaaggaaggcctcaagcgcggcacccgcgtgcgctgctacggcgaagcgcgacccggcgcatccggccttgagatctatcacccggaataccgcgccattaccggtgacgaaccgccgccggtcgacaccacgctcacgccgatctacccgctcaccgaaggcctgacccagcaacgcctgcgccaactgtgcatgcagacgctgaccatgctcggtccgaaaagcctgcctgattggctgccccaggaactggcccgcgactatcaactggcgccgctggacgatgcaatccgctacctgcatcacccgcccgccgacgccgatgtcgacgaactcgcactcggtcatcactgggcccagcaccgtctggcctttgaagaactgctgacccaccaattgtcgcagcaacgcctgcgcgaaagcatgcgctccctgcgtgcaccggcaatgcccaaggccacgcgcctgcccgcgcagtacctggccaacctcggttttgcgccgaccggtgcccagcaacgcgtcggcaatgaaatcgcctatgacctgagccagcaagagcccatgctgcggctgatccagggcgatgtgggcgcaggcaagaccgtggtcgccgccctcgccgccctgcaagcactggaagccggctaccaggtggcgctgatggcgcccaccgagatcctcgccgagcagcacttcatcaccttcaagcgctggctcgaaccgctgggcctggaagtcgcgtggctggccggcaagctcaagggcaagaaccgcgcggcggcactggaacagatcgctggcggcgccccgatggtggtgggcacccacgcgctgttccaggacgaagtgcagttcaagaacctggcgctggtgatcatcgacgaacagcaccgcttcggcgtgcaacagcgcctggccctgcgccagaaaggcgtgggcgggcggatgaacccgcaccagttgatcatgaccgccacaccgattccgcgcaccctggccatgagcgcctacgccgacctcgacacctcgatcctcgacgaactgccgcctggccgtacgccggtcaacaccgtgctggtcaccgacacccggcgcgtggaagtgatcgaacgcgtacgcggcgcctgtgccgaagggcgccaggcgtactgggtgtgcacgctgatcgaagagtccgaagagctgacctgccaagcggccgaaaccacttacgaagacctcaccagcgccctcggcgaactcaaggtcgggctgatccacgggcgtatgaaaccggctgaaaaggccgcagtgatggccgagttcaaggccggcaacctgcaactgctggtcgccaccacggtgattgaagtgggcgtggacgtgcccaacgccagcctgatgatcatcgaaaaccccgagcgcctgggcctggcgcaactgcaccagttgcgtggccgtgtgggccgaggcagcgccgccagccactgcgtgctgctctaccacccgccgctgtcacagatcggccgccagcgcctgggcatcatgcgtgaaaccaacgacggttttgtcatcgccgaaaaagacctggaactgcgcggccccggcgaaatgctcggcacccgtcagaccggcctgctgcaattcaaagtcgccgacctgatgcgcgacgccgacctgctgccagccgtgcgcgatgcggcgcaggcgctgctggagcgctggccggatcacgtcagcccgctgctcaatcgctggctcaggcatgggcagcaatacggccaagtgtgacgcctgacgcacttaagcgaccaacagttgtatcaagctggttatacttcgtggactgtaagaaattggatcaggccatgtcagaagttgccctcgccacagccccactgaccgccccgccggtcattcgggctctgctcgccaaactcgtcatcccctacacggaagtcgccgacctcccgggcctgaatcctgcgcagaaggtccaggcggtgctgttggaagacgcggtgggcgccctgatggtgctgtttccgcagaaccagttgctcgacctcaaccgccttgccgaactcaccggtcgtcgcctgaccgctgtgtcgccggatcgcgtcaagcgcatgctcgacaaacatgacctgagcctgctgcctggtctgccaccccttaccagttcgccctgcctgtacgaaggcagcctgctcaacgagccgagcctgctggtgcattcgggtgaagccgggctgctgctcgacattgacaccaacgccttcaagaccctgctcaccaaggccagcgccgggcacttcggcgagccgctgagcaatatccgccccaacctcgaccgccccaatgacgaccgcgaggaaatcacccaggcgatgcaggcgttcaccgcccgccgtatccagcaacgcctggaagcgaccatcgagattccaccgctggccgataccgcacagaagatcatcaagctgcgcgtcgacccaaacgccaccatcgatgacatcaccggcgtggtcgagaccgacccggccctggccgcccaagtggtgagctgggcagcgtcgccgtactacgcctcgccgggcaagattcgttcagtggaagacgccatcgtgcgtgtgctgggcttcgacctagtgatcaacctggcgctgggcctggccctgggcaagaccctgagcctgcccaaggaccacccgcaccagtcgacgccgtactggcaccagtcgatctacaccgccgccgtgatcgaaggcctgacccgcgccatgccccgcgcccagcgcccggaagccggcctgacctacctcgccggcttgctgcacaacttcggctacctgttgctggcccacgtgttcccgccgcacttctcgctgatctgccgccacctggaggtcaacccgcacctgtgccacagctatgtcgagcaacacctgctgggcattagccgcgagcagatcggcgcctggctgatgcgctactgggacatgccggacgaactgtccaccgccctgcgcttccagcacgacccgacctacgatgggcaatacgccgagtacccgaacctggtgtgcctggccgtgcgcctgttgcgtagccgcggaatcggctccgggccggacgaggcgattccggatgcgctgctcgagcgcctgggcttgagccgtgacaaggctgaagaggtggtgggcaaagtgcttgatgctgaagtgctgttgcgcgaattggcgtcgcagttcagccagggctaaatcgatagcctgtcagaccgctatcggggggcaagccccctcccacacttgaaatgcattcccctgtgggagggggcttgcccccgatgaatccacctcggtctacttctttttcttcggcttcaaatacttggtcaacccctggaaccagatcaccagcgccgggttgcccttgatctggatcgacttgtcctgaatccccgtcatgaacgccaattgcttgttcttcgcctgcatcgtggcgaagccgtaggcggcatctttgaacgcaatggcaaacgccggcgccgggtgcacacccgagcggctggtgatgcgctggtctttgacgatgaagtgacgggcaaccttgccgtcgagggtctgcagctggaacgccaggtctttatcgcccaactgttgctggaaggcaggattggtgcggctggctttgcccatcatcaagcccaacacccacaggagaagacggaatttcatgactacgcagcctcgttgaattaaacagcaggcgcagtttatcgattcccgcctagaacaccaacgaagtttcgtagcactaagaggtagacattcgctgcaggcctaatgaccaagcagtcacatcttaaacgctcgaccgacattcaaagacatgatgatttatcctgttttttgaactagcgcatattcaaaatcattctaaataactgtcaaaactcacagttatgccacaaccaaacacgccatagagtttaccaagacgtcaatcaaacaccattgattacgcgaacaaacttgaggtgtccctcgtgaaagcatttgccaactgcccaaaattcattcgtaacggccctacaacgccaaacagcacaggctacctgaaaaccgacatttcaatgttgccccttcccccgtttaatacgttcaaagccaccaaagacttgaccatgcggtttaatggagatcatctcgaagtcgttgcaaccgttgatatgtatccccacttgcgcttctacatttacatacacaaagaggacttacacaatgaagggacgttaccgatagatccctctggtctccccggcacagcctatgcgggttttattgccgataagctatacgacggaaccaaaggggaactttcgttctgctaccacggccgagaaggacgactcgatgccacgctgcactttgaggcagccccctatgggttcagcgatggagtcgttgaggtaacaggtctggaacctcccgttaaatagagttaaccagcctacgtagaacgccagtcagtaaaaccagctgacgttctacggttgaccacagcgtcttacttaaacattagggcaaggaaccggcgcccagtcggccaggttcggatcgcggcagctaccttcgagctgagctttgccggcgctggcgacctgcttgctttcagcctgcttggcctgcacggtctggatgctcttctcggtggtgacggcttctttcggcacgactggcagagccggctttttcgcaaccttgaccggcttcttgcccttggccggagcggccacaggtgcggtgtcggcggtcgccacggtcactacgtcattacgctgcacgcccacctgttgcaggtctttctcgtaagcctgggtgtagttgttcaggtcttcgctggccttgccgttgaccgcaacgatcaggtcattggactccttcaggcccgccacgatttccgccaggcgcttgcggccttcggtgtcgttgacggtcttggccttgcggtcggccaccagcttggtgaacgcgctctggtagcactgttgcgatgccttggcgtaggcggtgctgcgatcgatgtcggaggcgcttttgttgaagtcggtggagtacgacgcgatgcgctggttgtcatcggcgatctgcttctgacgctcggtgtagtaacccgccgcgccgccggccagggcgccgcccgctgcgccgatggcggcgttacggccacgcttgtcggagtcgccggtcagcgcaccgagcaatgcaccaccggcagcgccgatggccgcgccggtcacgaccgacttggtcatgttcgagtcggtggcgcgcaagtgctgcaccggctcgtagcagttggggtagtactcgaccttggtgctcgacgcgaccttggaggccggcgacgtggcgcaaccggtcagcacagtgctgaaaccggccgcgatcagcagcaagtgacgcttggaaaccgccttacgggaaaaaagcataggtgtgttctcttttaagtttgacttgcccagcacggccaccgccgcctgagtcccttccaagctcgctatacagccagcgctcatcgctgaccgctcgctgcgagcaattccttcaagatcgttgccgggtcggcccgctgttgcttgcggtagttgccgacatggcgaacgaacagtgttgcgcgcgtcaccaggctcttgccgagcaccggcttgcgatccaactcttccttgatccgttgaaactgcgcctggatcaccgcatcggtgtaacgcgtgccggtggccaggttgtcgatatagatcgccaccgcgccatcgagggcgctgcggccattggcaatggccatgtcgaacagttgcgcgctggccgcgtccttgttgtccagggcctgctggcgactcttctgcaggttggccaggcggatgttgtagttggcgatggtctcggccaccagcgcggccgactgaatcaggttgcccgccgcttcttcgcgctgctgggcgatcagcgagacgttgcgcttgagctcttcattgaccagccccagttcggcttgcagcttggggtcgacgctggcggcgatgatgctgtccaggcgcttggtcgggtcctgggcgtcgtcgatggcatcagtcagcgcggccaggcggccctctttctgccactgggcgaacagctccttgtagcgtgaacgcggtgccgacagcgcaccgatcgccacgcggaaaccggtggtctcgttgctctgctcggtgccatctgcggcgaacagtgggtattcgcggcgcatgccggtgaacagcgtgccctcgccttccaggtagttgccgcctttgaccacaaagccaccgtaggtgccctggcgacgcccggcgtggaccagttggaacgattcctggaccatttccgcggcgttgccgatcacgtcgaacagaccgatggggttgggcaatttggtgccgatgggcatcaggcgcgcagcctgcccggtgccgcccgccacctggttgaacaccgcgtagtcgccgagcgggccgtcgctgtcgctgccttcgacacggcgcgggaacaggcgcccttccaggtcctggcggctcacggcgtgaccgccgcgtgcggcaaattcccactccacttcggtagggaggcgcacaaagcccaggccgccatcatccgccgaggagccacgaccactcaccggcagcaagtctcggtggtatttcatcaaccaggcgctgtacaccgccgagaagcgttcagcctcaaagcgcgacagtttcaccttgggtaagcgcccggccatgccggtcggtacatcgcacgccggtgcaggctcgccgctggccagcgactgcgcctgggacatcacctgggcgtactggcgtgcggtcacttcgtacttgccgatgaagtacagcatgggcttgagtggggtcttggcgtcggtcttcggcatcaagggcgcgatgactttgttccagtccttgggcaggtccttgagggtgaactggccgttgatgaagtcgcggcggtagccggaaataaacgattgctggtaacccgcctcgccttcggcaaaggggtagccgaggctgatctcgcggtcatccagggtgccttgggccagcacgtaggcgtagcggaacagcatgttgccttcgcagggcagcggtaggctgacatcgccttccaacggcttggggttgtcgagcttgtcactcgcctcatcggcccaggccatcgaggccagggtcagcgccatacaggcgcccagtaacttatacatctctgattccttcagaagcctggacccgcgccactcgccaaccaccacacgccgccgccacggcgctgacgccgaggactgcgaccagggccaggccgtaatggcgcgccagcaggtggctggcgaattcgcccggcacctgcacgaataattcattcaagcccgcctcggccagcccatacagcccggcactgagtacggcagcaaaacccgcgctgtacagcgcctgtaccaccacgaacaacagcagcccaccggtggaaaaccccagcaggcgcaacaccgacaactcccgccgcttgcgcgccacagcggccagggcgccggcaaaaatcgccgcaaacgcccccgccaacgccaacccgcagatcacccagaacacgatcgacaggttgcggctcaacgactgcacctgcgcgatggtctgcgcctgggtcgacaccaacaggttctgcccggcgaagtacacccgcagcggctccacatcggtgaggttgcgggcgtacaggcggaacgccgggtacacgcgctgctcactcacacccacggcctccccgtcccaacccaacgccggcactgcgcggccatcgcggtaatcttccgccgcttccagcaaccccaggtcggcaaacaaaccgtcacgggcaaaggcttccagcggcaacaccgccagcacctgcacccgcgtgcgctgggcttcgacgcgcccggccacttgccgtgcaaagctggtttccagccaatcgccaggccgcgccgcgagcttttcggcggcggtgtggctcagcacgatctggtccaggcccttgggcaccggcaggccggccagcagtgggtcacccgacgcggtcggcagcatctccagggccaacgtgcccacttgcgccgtcgccgcaatctgccgcgtacgcggtatggcgaacgccacctcaccgcgctcgcccagttgctcgataaatgccctgctgaatcgaccaccgcccagcggaataatttcacgggtggcggggtcggtctgcaaacgttcggtcaaactgctaaccagtccaaacttcaggccgaataacaccagcagcggcgcgatcaccgccaccagcgccagcaccgaacaggccgacagccaggcgtcattgcggtaatcctgccaggccagcgacgccaccagaccgatgcgcatcagcacacctccccgagggtggcggtgacgccgccatcggtgtcgcgacggcaactgatgcgccgcacctgcaagccactggcgcgggccaggggctcgtcatgggtggcgatcacacaggccgcacggtgttcacgggcctgggccagcaatgcctgcatcacgcgctcggcattcaacgggtcgagggacgccgtcggttcgtccgccagcaccagttgcggcgcatgggccagggcacgggcgcagctgacacgctggcgctgccccaccgacagcgccgccggcttcttggccaactggtcgctgatctccaactgctcggccaggcgcgtcacgctgccatcgtccttcaaacccagcagttgccgggacagggcgatattcccgcgcacatcaagaaagcccagcaggccgccggtttgcagcacatagcccaagtgctggctgcgcagcgcggccaggctggattgccgatcggcgcgccacagcccggcgatgtcctgttgatgaaattcaaactgccccacctgatccggcgccaacaccagcgccagcagatcgagcaaggtgcttttaccgcaaccgctgggcccgacaatcgccacttgctcacccgcacgcagcgccagcgccgggatcaccaggctatagcgctggctgccgacgccccggctcttgtgcaccgcattcaggttcagcatcacggcaacgtcgacaatggcacgcggtacaacgcgtcgcccggctcggcatcgccgaagcggacccagttggccaggtcattgtggaaggtttcgtagaggcggattttcgagtccagctcgtcgataaagtcttcctgctcggccacgctcaacgacaaccacaaatcctgggtcatgttcagcgacttgctgcggtacggcaggccttcgaggtattcgccgagaacgccgccgtcagccaggttgccgcccttgcgcagggcctgcgggtcgcggctcatgtaggccgaggcgctggcgatttcctggaagaagtctttcggtgaggtctgggtcttgcgcgccgcgtcgacgatcagtttcagcgactgctgcaggtcgttgagctgcaacttggtcagcatcacgcacacctggaacgccggcagcgccggattggtcaggtcgcggtcggcggtccaggcgctgaccagctgcggcgcctggctcgcggttttgcgaccgaggaaatccatgtgcatggcatagccgaccgctgcagacttgtccgccaggctcggtgcgctgttcagcaacggcaccggctgcggcgtgttgctgcgcacctggtgcaccaggttggcgaacaccgtgccgatctcatccacccgctcgccgagcttgcgcacatcgccaccgggcaccgccgtgtacaggtcgccaatctgtgggttggcgtcggcggtgaggatgcggtactggctctcggcgccggcgtgggttttcttgccggcgtcggtgcgcaggtgcaaggcgtagatcttgatctgcttgcccagcgcggcctggcgcacttcggcttcgttcatctgggtagcggcgaacgggtcgttcttgcgcagcgcgccggcgtcggtgacgagcaggatgatgcgcccgccataaccggaccaatccatgccgtccaccgcctgcatcaccccggcgaacgcatcttcgttgaaggagtggctggacacggtggatgccttgacctggcgcgccatgtcgaggaagcgttgcgggtcgcggccctgatcgaggctgatcagggtcttggccacgtattccaggcccggggttttcttgatgctgctgcgaaaaccgaccatgccgaagctgacactgtccaactcgccgcgctcggcgatgcgggtttgcagctcgtgcaccacgtcgcggatctggtcgatatagggctgcatcgacacggtggtgtccaccaccagcaccaccgccgtgcggaaggcgtcggcgttggcattcatcaccggggtcgcgggcttggctgccgcgctgctgccggggtcgatggaagccacattgagcaactgcaccggttggccgttttcgtcgaagctttctttggagtcgaagatcggcaacaggtagaactggttctgcgggacggcgctggcggcgggctccaacgccaggatctggctgttgtcttcgctgtttttctgcgccttggccagcacgcctttggcggccgaagggtcagccaggagtttttccacttcgccggattggcgcaggaacatcaccggtgcccggcccgagcgctcggtgaatttcagcaccaggctctgcttccagtcgctgacttgagacgcaggcaaccaaccgtcgctgcgcccatcggtggcggcgccgacacgcacccacgggctgccgtcgacgtccttgcgctggtacacatagagcacggaaaacgccggcagggccttgcctggcgcgctgcccgcatcggtggaaagctttgcgcccggcttgctgagcacgcgctggaacagggtcttcttgcccgccatcaacagcggacgctggccgccgtccacttcggcgaccgctggcggcggtggggtgacgttcggtacctgggcagcgggcggtttagctaccggctcgtcactgccgctcaaccaccagtaactcgcaccgccaatcgccagtgccaccgccaccgcaaccgccgccagcgccaacaccggcccacggcgctgctcgctgtgctgggtcggcggcaccaccggttggcgcaccggctggggtttctcgctgggaatctcgatggattccggggtgatgcccgccaggtcgaaactcatcggaatcggcagcggccgcaccagcgtggcttccggcgagtccgccggcaggttatccaaggcccgcaacagcgccgcggcgtccgggaaacgctcagccgggtccttggccaacagcttgcgcagcacgtcctgataacggccatggtgcaccggcagttccggcagcggttcggtcaggtgcgccagcgccgtggagagcgcatcggtgccggtgtaaggcagcttgccgaccagaatctcgtacagcaccacgcccagcgcatacaggtcggcgcggccgtcgatctcctggccccgcgcctgttccgggctcatgtagctgggggtgcccacggcaaacccggcctgggtgaattgcgtgcggtcatccagtgacttggcgatgccgaagtcggacagcaccgccgtgccatcggcgcggaacagaatgttcgccggttttacatcgcggtgcaccaggccctgggcgtgggcatagcccagcgccgaggcgatctggcggatcagcgtcacgccctgctccggcgtcatgccggcggcgatgcgctccttgagcgtgccgttgggcaggtattccatggccatgtagtacagctcaccgacattgccgatgtcatggatggtcaccgtgtgcgggtgcgacaaccgcgccagggtcttgccctcgcgcaggaagcgctcgcagaaggttggatcggccgccagcgccgccgccatcaccttcaatgccaccttgcgctccagcgagcgctgggtcgccaggtacacgctggccatggcgccttcgccgatctcgccttcgatgtcataaccggggatgacgatgttcatggcgataccttcacgacaatggcggtgatgttgtccggcgcgccccggttgagccccaggtgcacgaggctgcgcacgatttcatccggcgcgtcgtggctgagcacttcgcggatttcatggtcttcgacggttttgttcaggccatcgctgcacagcaggtaactatcgccgggggcgatcagcaggtcgaccaccgccagctccaggtgggcttccacgccaatcgcgcgggtgacgatgttggcgcgcgggtgcgtacgcgcgtcggcttcgctgagcaggccgctgtcttgcaggtcctggacgtagctgtggtcgcgggagatgccttcgagcgcgccgtcgcgcaggcggtacaagcgactgtcgccggcccacaggcacacaccgcgcaggccacgggcggccaacaccaccacggtgctgcccatcatggtcacgccacggttggcggtttcttcgcgcacggctgcgttgatgcgctgcaggtcgttgcgcaacgctgccgtgtattcatccagcgaacgccccaccggcacgctgcgcaagctgtcgacgatcaggctgctgacatagtcgcccgccgcgtgcccgcccataccgtcggccaccacccacaggcggttttccggcaggtccaggcaggcgtcttcgttgacctggcggaccatgcccacatggcttttgctcgcggatttgtacgtcgaccccatctacaccacaccttcttgtccgagcaaaaactgcgcaaaatcgctggcgacaggcaggccctgacaccgcagcaaaccaggggaaatacgttgcgaaccacgcccccaccacaggctggcgccttcgcaggcctgttcggccagggccgtcatgcgctgctgcggcacggtcgcggccacccgttgcaggccggcgaaacgactgtccacggcacgcggctcgctcgccggcaagcccaggttgtcgaggccgtggttgaaactttcaaaggtggcgccggcatccagggtgctgagcaacagttcttcggcctgctcgaaccagttgtccgggccgcccaccagagaggccggattggtgtcgtggtcgagcaacaccaccaccgccagcgggaagtagcgccccacccggtcgatgctcggcattaccacgcccgccgccgcatccggcccgcacacgcccggcgccagcacaaagcgccacagcgggctgaccaggtaagtattgagccattcaccgccgaggctgttctgactggccagcaaacccgccgccagccagctgtcccacgggccgataaagctctggggcaaggcgcggctgacaaagtcgccacggctggccaacttgccgtagaagcccagcgtcgtcatagccgctccggcaggctgaagccactgagcacgcggctcttgaacgggttgaaggcgctgttggcgcgcaactcgtaggcaatgctcgcaccgtcgacgcgcaggcgcaggttgaagcggtccggcgaattaccggcggtgaggtccgactgttccagcaagcggaaccaggcccacggcccgtccagggtcacgccggaacggccgctggcggcgggcggcatgatcgaaatgcgcaccacgccaatgctgccggggttcggccattgcatcgccaccgggcggctggggccgtggtcgtagctcagctgctggccgtccaggtccagcaggaactgggtgatggtcgggtccatcgacaccggtttgagttcgaaacgcacgatgggttgagtcccccccgcgcggaagaacgcatcgcggatcgtcgcggcacgctggaaggtctgcagcacgcccggagcaatccccagcttctgcgccgcgcccggctgccaacgccaggtctgcgcggacgtatcgacgtaaggctgcaggtatttgcggaagtagttgtccatcaccccgcccacgccgaagaattggccgaagtcatccagggtggcgtcccgtgcactgcccggcgacatcgggtagcgcccggccagggactgacgatacacgttgaccacttcgctgacccaggcggcgttcaattggttgcgcacgccgcccatcatgctgttggtggtggagttgaccaccgacttgaccatgccctgcaccagcggtggctggcgctcggcattcaggctgactcgcgtggccgcagccgccgcctggttcttcgcctcgccgagcaacgcatcgccgctggcgccgaccatggcgctgacctgcacatacagcgcgttcatgtcggtgagcaggccgtcgatggccgccggttcgccttcgttcttgctgacgatgctgttgagctgggcgaagtgcgcggtcaccgggtcctccgccgccgcaggcgcattggcagtcggttgttcctggccgagcaggctgcccaggcgctccttgagcttgtcgacgccgccttccactggcacgcccttggcggccaactggcgttcttcggcttgcaggtcggtttccttggccaccgccaccagcagttttttcagaggcgaggtcggcccggaaatcacccgcagcacatcagccgcctgggccacgctggtgatcggcacaaagtcgatgtccgccagcaacgcatcccactggcgctggtagtcctggaaatacaggcgccgcacatcggcggccaggctcaccacgttctgctggtcggcctgttcctggcccaacacccactgctcttcagcgagggtgccagtctggttcagactgctcagcaggaacgcctggcgatagcccttggcggtgaagaacccactcaacggctcgcccagcggcttgccgcttttgcggctgaacaccagcgcggcgtcacggccagcggcttcgttgaggcgaaagtccgggataccctcgggcagtttctggcgcttgacccggtcatatacgcgctgggccaccggcagttgttgcaactggcggcgcaggtcgtcgatcagccgctgatccaggcgcgcgttcggcgggtggcgttcgaacagcgactgcaagtgcccggccaatgcctggcgctgatccgccggcaggtcgcggggcaggttgcggtcccagtccagggcgatccaggccttgatgaagtccgggtcgtaatgctcggcgtcagccagcatcaggtaggccttgaggccttcgtagaggaagtcggaattgccgccgccgtgcagttgttcttcgatgcgcgtcaccaggcgtggcgcgaacaccgcgatcagcagcttgcggtagacgctggcagactcggcttcaagcatatcgccctgatacagcccgaggccttcggaccagctcggcgaatcgcccgccaggtttttcacggcgttgagcaacggcagcacggcgagcacttcgcgctgcgccgggctcaggttctgcacggcctggcccagcggcgcgaccttctggtcgacctgggcgatgtaggcctggttggcgcgataactcacccaccacaaaccgctgaccaccacgaccaacgccacagtggcggccaacacaccccgcgcaatccacttgcgccgacgctcgaccttcgggttcacccccaccaggccacgctcggcaaacgccacggcggtgaagagtttttcgatgaagtagctgcgcccggtgccgctctggcgcgccaaatgctggcggtccaggttcatgctctgggccatggcgccgatcaggcggtcaatcgggctgccttcctgggtgccgctggtgaagtacacgccgcgcagcaacacgcgctcttcaaaggcattgggtttgaacacgccttcgaggaagctttgcaaacaatccttcaaggcgccgaactgctgcgggaagccatagatcaggtcgcgccgcgccgggtcgcgttcctgttgcaggcgttcgaccaggcgctcattgaggcgctgttccagcccggcgaactcgctttgcaggtgtgccaatgggctgtcgctgtttttgccatcgtccagggcaaaggtcatgccccacacctgggcgcgctcttccttgctcaggttatcgaagaactccatgaagcccggcaccaggtcgagcttggtcagcatcaggtagatcgggaagcgcacgcccagttgggtgtacagctcctggatacgcaggcggatggcagcggcgtgggcggcgcgctcggcgtcggtgcccagcaacaggtccgacaggctgatggcaatgaacgcaccatcgatggggcgacgtgagcgctgttttttcagcaggtcgaggaagcccagccaggcggccttatcgaccgtggagttgctatcctgggtggtgtagcggccggcggtgtcgagcagcacggcttgatcggtaaaccaccagtcgcagttgcgcgtaccgccaacgccacgcaccgcaccggcgcccaactgcgccgccagcggaaaatgcagcccggagttgaccagcgcggtggtcttgcccgaacccggcgggccgatgatcacgtaccacggcaactcgtagaggttgcggcgctcatcgccaccgagcttggcctttttcagcagggccagggcctcgtccatgcgctggcgcagggtggtgagctcttcggcggtggcgacgctgttggggtcggccggggtttcggcggccaggctgcgcatcacttcagcggcctgacggcgggcctggataatgcggaacacgcggtaggccagccacaccgcgaacaccaggatgatcaacgcccagcgccggccttctggtaccagcacgtcgagcaacggcccgacaaaccagatgatcaggctcagggcgatcaaacccagcacggggatcacccagcgaatcatgaaactgaaaaacgccttcactcgacgccctccgccaatacggtgatttcaacccgacgattgcgggcacggccttcggcggtggcgttggtcgccaccggctcggtgtcgctgcgcccttcggcactgaagcgctcggcctggccggtcttggccgccaggatctccagcaccgacttggcccgcgcttcggacagcgcccagttggacgggaagcgcaacgtggcaatcgggcggttgtcgctgtgcccggtcacccgcacctggcccttgaccttgcggatggcgtcggcgatgcgcagcatcagcggctggtagtcatcgacgatgctggaactggcggacgcaaacagctcgtcgccgcgaatggtcaccacggagcggtcgaccgcatcttccactgccacgcggccggccttgatgtcttccaccaggaagccagccaggcgcggacgctcgatgactttgggctgcgccaccggacgatcgatggcctgcaccgggatctcgcccagggcatggatattcttgaacaccggctcggcatccgacgccagcttcatgcgcaagccaaacagcaacgccagtaacaacgccaagccgatggccacggcgatccacggcggcatgaattgcgccaggcggtcgcgggccacggtcacgccgcgccagtgcggcgacagctcacgctcatgctcgccacgcgcactgcgaatggctgcagcagtgcgttcgcgcagggtctccagctggctgcgaccgtcgttcatcacgcggtagcggccttcgaaccccaggcacatgcacaggtacaacagctccagcagatacagacgttcccgtgggctttgcaggcagtggtccaacagttggaagaccttttcgccgccccaggcttcgttgtgcacggtgatcagcaggctctgtttgccccagtcgctggtactgccccagggcgtgctcaataccgcttcatccagcgcggtgcacagcgcgtaacgcgccagcagcacttcgttacgggcgatgccagcggcttcggcacgctcttcgaactggcgcaggtaggccaacagctgtgcgcgcaggctggccggcgccgggtgggcgatggtgttgcgcaggcgcgtcagcagcgccagcaaagggccggcggcgctttccagcgggttgaggccgtggctcttgccggtgagcatcggcgcggccggcatggccagcggcgaaggttcggcacgcacaggttccggcgcccggccacccggacgcggcatgaactgggtgcggtcatcatcattgggatgcatcgcggattatcctcggatcgcccagaaggccaggttcaaacccgggaactgcccggcgatatggaaggcgaagccgccggaattgcccagctgttgccaggcctcgctgccgcgatccagctcgtaataggtcgaacctgcgtgatacggcaattggcgcggcgccactggcagcggcaacaggctgatgcccggcagttgcaggttgaccaggtcgcggatgtgctccaccgagccgactttgctctgctggccgaagcgtgcgcgcagggtttcgccgggcacatcggcgcgcaccaccaggatgaaactggcgttgtcgagcagggtcttgtcggccagcatcgccacgtgcacgccgtaggctttctcgacaatcgggattggcgtggccttgctgtcgatcagcatcgacagcgcttcgcgcaatgccgccatcaccggcgcgaagctcagggccaggtcgtcgtgctggtactgcgggtattcctgggggcgacggccggaggtggagaaggtcgagaactcgccggccaggctgaccagctcgctgaagaagcgctccgggtgcaacgggctcaactggctcaaatgctggaccagcggttgggcacggttgaccagttgcagcagcatgaagtcggcaatctccgacgcgccaccggcgcccgatgccaccacccgccccgccagagcttcgccgcgctggtgcagcaggccgagcagttcgctgcgaaaggcggtgagcggtttgctcgcggccacatccaataccggcgggatgtaggtgtcatcgagcaccaatgcgcggtcggcacgtttttccttgatgcgcaccaggcccacggcggcgtaatcgctgatgccatcctgggcggtgagcaggcgcagggcgcgggaacccacggccaccggggcgcggttttcgaagggtgcgttgtcatcgcgcacttcgcgcacctggctcacataacgcgcagcctccagggcttcgccttcatccacggtatcgcgggcgccggcgcgcttgagcggcagggccaggtacaccaggccgtcgcgcaggttgtcgtcgatgttcagcgggcttggtgccaggtcatcctgggggatattgaacggcgtaccgtcgggcaacaggccacgcgccgatacgatcgccagcttgccctgggccagcaggccctggtcgatcagcagctcggaaaacccccaggcgcctgcggacaacgggcggctgcgggcatcgatcaggttttccaggtaacggtcatgctgctggaagtgctgcgttccgatgaacatgccttccgaccagaccacgcgattgttccaggacatgggggctccgattgcttcttattgggcagggctggatggggtggccacgacgtcggcgcgcacagcacgcacatcgaggctgatctggtattcggtgtactggcgcgcgggcacgttgagcaccgtacgccattgcgcacgatccaactcgcgatagcccaccagcaagccgatctggcgcgtggacgggtcgaggtcgcgctggatgctcagttgctcgccgggttgcaccatcacttcgtcctggtccagcaggtccaggcccagtgtggattgcgcacggtcggccagggcgaagtaatcggagcgggcgaaggtggcggcatttttcagttcgaaaatgcgcacccgcaccggggcggcctggccgttggcgccggggttaagcccgctgatcgcatgaaagtgcagctcgacggcggccgtgtccacttcggcctcggcggctgtttcgggtttgacggcgtctttggcacacgccgtcagcagaaacacggtggcgactgcgagtaaaaacctgggaatcatcctgcgtcctcaatgacgtacttagctatccgttaaatccatgtgctgcggttcagcgtcgctgtcgtgcgctgtgttcttcgtaggctcggctgaattcgcggccgaacaggtcctggaaatcttcctgggcctcgcgggaaatattgctgtagagctcggtgaactgctgccagtactgggcctggcgcgaaccattgaaaaggctcgacagcccgccgggcttgcccatgcgttcttccagttgggccggctcgaagcgactgagcaggtgcttgatcgccgcttccacgccggccatcaccgccaactggtgggcacgcaggtcgttgaaactgtcgcgcacggcgaggtcgggtgccataaacgcctggttgccgtggcgcaggagcagcagtaacgcttcgtcggcattcggggcgaatttcaacggattgttttctgccggctggatcatggtctgctgcatgcgaaactcgcccttgaggctggcacgggcccgcagcacgtcgatcaggccttcgaccatcaggcggtagctgcggccgatgttttccatctgggcctcggcctgggctttgtccaggcgcagttgatccaggcccgcgccgcgcaggaaggcttgcagcaggtccggttgctggctgtcggccacggggggcgggggctcgaccacggggggcggctggatgaccggtggcggcgcaggtggcggcgcagcgctgacgacgggtgctggcgtgtcgccaaacaggtcccagtcttcgggaatcaccgcgcccgacaccaccggcggtgccactaccggcgcagccactggcgtcggcggacggaagtcatgttgctcggaaggcacgtggtccggcacggtcggtggcggtacggcggtggggctgaggaagtcgaacaggtccggcagcgtgtccatcgatgaagcgccctggaactgcggcgcgatcacaggggtggaaacaggcacgggcttattcgacacggcacccatcagcgcttcgaaactgttcggcgcctcgccggcaaacggctggctgtcgacggcctgtacgttgaaatcgatacgcgcctggatctcgtaatcgccgatgcggatcagctcgccatcctgcaacagctcgctgttacctctacgcaaacgaataccggcgttaaccaactccacgccgttggtactgttatcggttaaataataacggccatctttgtattgaataacgcagtgctgcgaggagaccagacgctcaggatcaggcaatacccagtcattatccgagctgcggccgatagccatcgagccctgattcatggacttttcggagcactgcccaggggtaatcttgtgataactagtgatagtcaaacacagcgacatcttgcctccttgctgatacttcgcgcgcggtcgattcccgggacagcgcttcccgggatatccccatcaggtcgagcaatcgaccgtccaaaacctgccaataccagcatgatcgctgatcttaactgggctctatgacaaaaatcctgtcccggtacgtcgttcgacccactagtcgcgcaggttgttaagcaccgcacatctgtcacagagggcgaatagcttaccttgacaaggcataagtactacaccaaaaatgcacaacttcttgaataccagtgatggcacattagtggcgtcttgcttatatgaccaagaaaacatgcaaagttccttgcgcaactaatgcatgaattgcccgccatctaacgggctgatagggagatcaaattcagtggatgtgccgttgctgctcaccgccgtttccgcgacttcgccctgtggcgaagacatggaatatgacgcgcaatttctgcaattggagcgtgatgccaagggccaacccgagcgcagcatgggcgactcgatcctgcccgctgaaccgccggaatggcgcagcatccagcagcaaagcctcgacttgctcgcgcgcagcaaagacctgcgcatcacccatttcctgctgcaaagcgccctcgccctccaaggcgtggccggcctggccgaagcgctgacgctgatcgatgcgttgctgcgtgattactggtccgacctgcacccgcgcctggacgccgacgacgctaacgaccccaccgtacgcatcaacgccctcaccggcctgacctgcgacaccaacatccgcctgctgcgcgaaagcatcctcacgcgctcgcgcaccttcggccccgtgagcctgcgcgccgcgctcaacgccagtggcctgttgagcttccccgatgaacaactcggcgcgcagcagctcaacgcggcgttcctcgacagcgaccccgagcagctacaggccacccgcgacgcgctgatcgcggcgcgtgcggcgtgcgaagccatcgaacaacaggtcaacgatcaggtcggttccgcccagggcgtggacctcagtgccttgaagcaaccgctcaagcaggcgttgcagatactcaaccaagcggtgcccggcgccgccggcagcagcgaacccgaggccgtcagtgacgacaatgccccctcggccgacttcgccgccgcccccgcagcaccgcgtcccgttggcgatatcgccagccgcgacgatgtgctgcgcagcctcgacaagatccttgcgtactacacccggcacgagccttcgagcccgctgccggtactgttgaaccgggcaaagaatctggtgcatgccgactttgcggccatcgtgcgcaatctgattcccgacggcatgtcccaatttgaaaacctgcgcgggccggacggcgagtaagccatccgactgtgcagtaacaacaccgtcgctcaagcgaccaggagcagcaacgtggcgaagcaaagttctcagaaattcatcgcgcgcaaccgtgcgcctcgagtgcagatcgagtacgacgtcgagctctacggcgccgagaaaaaggtccagctgcccttcgtaatgggcgtgatggccgacctcgccggcaagcctgccgagccgttggcgccggtggccgaccgcaagttccttgaagtggacgtcgacaacttcgactcgcgcctcaaggccatgcagccgcgcgtggctttccacgtccccaacgagctgaccggcgaaggcaacctgagcctggacatcaccttcgaaagcatggacgacttcagcccggccgccgtggcccgcaaggtcgactcgctgaaccaactgctcgaagcccgcacccagctggccaacctgctgacctacatggacggcaagactggcgctgaagaaatcatcatgaaggcgatcaaggacccggcactgctgcaagcacttgccagcgcgcctaagcctgcaggggaccagtaatcatgactgacaataccgcccgcgaaggctcccagatcctgggcacccagaccgaagaagccagcgagttcgccaacctgctgctgcaagagttcaagcccaagaccgagcgcgcccgcgaagccgtggaaactgccgtgcgcaccctggccgaacaggccctggcgcaaaccgacctggtgtccaatgacgcgatcaagtcgatcgaatcgatcatcgctgccatcgacgccaagctgaccgcccaggtcaaccagatcatccaccacccggatttccaacagctggaaagcgcctggcgtggcctgcactacctggtcaacaacaccgagagcgatgagcagctcaagatccgcgtgctcaacatctccaagccggacctgcacaagaccctgaagaaattcaagggcaccgcatgggaccagagcccgatcttcaagaagatgtacgaagaagaatacggccagttcggcggcgaaccctacggctgcctggtgggcgactactacttcgaccagtcgccacccgacgtggaactgctgggcgagctgtccaaagtctgcgccgccatgcactccccgttcatcgctgcggcctcgccgaccgtgatgggcatgggctcgtggcaagagctgtcgaacccgcgcgacctgaccaagatcttcaccaccccggaatacgccggctggcgttcgctgcgtgaatcggaagactcgcgctacatcggcctgaccatgccgcgcttcctggcgcgcctgccgtacggtgccaagaccgacccggtggaggccttcgccttcgaagaaaacaccgacggtgccgacagttccaagtacacctgggccaacgccgcgtacgcgatggcggtgaacatcaaccgctcgttcaagcactacggctggtgctcgcgcatccgtggcatcgagtctggcggcgaagtggaaaacctaccggcccacacgttcccgaccgatgacggtggcgtggacatgaagtgcccgaccgaaatcgccatcagcgaccgtcgtgaggcggagctggcgaagaacggtttcatgccgctgctgcacaagaaaaataccgacttcgccgcgttcattggcgcgcagtcgttgcagaaaccggccgaatacgatgacccggacgccaccgccaacgccaacctggccgcgcgcctgccgtacctgttcgccacctgccgtttcgctcactacttgaagtgcatcgtgcgcgacaagatcggttccttcaaagagaaggacgagatgcagcgctggttgcaggactggatcctcaactacgtggacggtgacccggcgcactccaccgaaaccaccaaggcccagcacccattggctgccgccgaagtgatcgtggaagaagtcgaaggcaacccggggtactacaactccaagttctacctgcgcccgcactaccagctcgaagggctgaccgtgtcgctgcgcctggtatcgaagctgccttcggcgaaaagcgcgtaaaccaccgatgagctagctcttctgtgggagggggcttgcccccgatggcatcaccggggtgtaactgacacaccgaggtgcctgcatcgggggcaagccccctcccacacaaaagcactgcccatttggagttaatcaaattcagtggcccacgccacacagggagaaaacatggctgttgatattttcatcaagatcggcgacatcaagggcgagtccatggacaaggcccacaaggacgaaatcgacgtgctgaactggagctggggcatggcccagtccggcaacatgcacgtgggcggcggtggcggcgcgggcaaggtgaatatccaggacctgtcgctgaccaaatacgtcgacaaggcttcgccgaacctgatgatgcactgcgccagcggcaagcacatcgacaaggtcaagctgaccgtgcgcaaggccggtggcgaaagccaggtcgagtacatggtgatcaacctggaggaagtgctggtcacctcgctgagcaccggcggttcgggcaccgatgaccgcttgaccgagaacgtgaccctgaacttcgcccaagtgatggtcgactaccagccgcagaaagccgacggcaccaaagacggcggcgcgatcaagtttggctggaacatccgttccaacaccaagcgctgatagcctttatggccgtggcatcgcgccacggccatacgtcctctgtccctctcgcaacccgtccgtggagctgctttggtgatcactgaaatcgcttcccgcgaccgtctgcaaccgtccctgttggaccggctgacggacgacgatccaaccaaccccaaggaaagcgccgacaaacgcgtgctgtccctgacccaattgaaagcctcggtactgcgtgacctggcgtggctgctcaacaccacgtcgttgctcgatgccgatgccacgctgcacaccccggccggcacctcggtggtcaattacggcctgccggcgctggcgggcaacagtgtttccagcgtggatatcaaggcgctggaagccctgatctaccaggccatcgccacctttgagccgcgcattctgcgccacaccctgcgtgtcaaagcccgtgtcggccatggcgagatgaaccacaacgccctgagtttcgagatcgaaggcgacctgtgggcccagccggtgccgttgcgcctgttgctgcaaaccgacctcgacctggaatccggccacgtacgcgtggtgaatgccgaccagcggaggcgcccatgaacccgcgcctgctggagctgtacaaccaggaactgcaccacgtgcgcgaaagcgccgcggagttcgccaaggaatacccgaagatcgccagtcggctgaccctgtccggtatggactgcgccgacccgtacgtcgaacgcttgctcgaaggctttgcctacctcacggcccgcgtgcagctcaagctcgacgccgagtacccgaccttcacccacaacctgttggaaatcgcctacccgcactacctggcaccgacaccgtcgatgacggtggtgcagttgcagaccgacccggacgaaggctcgctggccagtggtttcccgctgcctcgcgacaccgtattgcgcgctgcgctgggccgcgaaacccagacctgctgcgagtaccgcaccgcgcacccggtgacgttgtggccgttgcaggtgagcaacgccgagtacttcggcaaccccgccgctgtgttgggccgcctggccgccagcgagccgaaagccaaggccggcctgcgcctgaccctgcgcaccggtgccgagctgccgttcaacagcctcgacctggataatctgccgctgtacctcagtggcgccgacgagcaacccttccgcctctacgagcaactgctgggcaacgcctgcgcggtgtttgcgcgcaagccgggtggcgattgggtcgagcgcctgccccaggacgcgttgcgctcccgaggcttcgacgacgccgacgcggccatgccggtggtggcgcgggccttccagggctatcgcctgctgcaggaatacttcgccctgccccaccgcttcctgttcgtcgagttcgccgagctgagccgtgcggtcaagcgttgtgacggccaggagctggaactgattgtgctgttcgaccgccacgaaccgagccttgaaggcagcgtcggggcagcgcagttcctgccgttctgtaccccggcaatcaacctgtttcccaagcgcgtggaccggatccacttgtccgaccgggtcaacgagcaccatgtgatcgccgaccgcacgcggccgatggatttcgagattcactccttgagcggcatcaccggccacggcaccgggccggagcaaccgtttttgccgttctacgcggtgcgcgacccgtcgcgttatggccgtgaccaggcctattacaccgtgcgccgcgagccgcgcgtactgtccagcgaccagcgccgcaacggtccgcgctccacctatgtgggcagcgaaaccttcgtcagcctggtagacagccggcagtcgccgtaccgccacgacctgcgccagctcggcgtgaccgcgctgtgcaccaaccgcgatctgccgttgttcatgagcgtgggcaacggcaagaccgacttcaccctggccgacagcgcgccggtattgtcggtgcgctgcgtggcaggcccgagccgcccgcgccccagccacgcgcatgacgccaaggcctggcgcctgatcagccagctctcgctcaactatttgtccctgagcgaacagggccagggcgccggcgccttgcgcgaactgctgcgcctgtacggcgacagcaacgacgcagcgctgcaattgcagatcgaaggcctgcgcgacgtcagtagcaaagccgtgactcgacgcctgccgatgcccggcccgatcgtgttcggccgaggcctggagatcaccctggaattcgatgaaaacgcgtttcgcggcaccggtgtgttcctgctcggtgcggtgttggaacgcttcctggcacgctatgtgtcgatcaacagttttaccgagacggtgatccgtaccaccgaacgcggcgagatcatgcgatggaaagccaagcccggacgtcgtccgaccctgtgagtaccctggatgcgatgcaccaggagccctgggaatacgatttcttccaggcgctgcggcgtatcgagtgcgaatcgccggagctgccgcgcctgggccattccctgcgcctggcggatgaccccctgcgcctggggcagcaggccgattgcacgtttgctccggccacgctggcctcggtcgaccccggcggcgacggcaagccggcgcgcctggagcagttcttcttcggccttggcggccccaacggccccctgccgctgcacatcaccgagtacgtgcgcgagcgtcagcgcaacaacgccgacagcaccagcaagcagttcctggatgtgttccaccatcgcctgctgagcctgttctaccgggcctgggccgaggcgcggccgacggtcagccacgaccgcccggacgatgactactggtcggcacgcctcgccgcgctgagcggccggggcatgccgagcctgctgaatcaggggctgatcccggataccgccaagctgcactacagcggccacctgtcggcgcaaacccgctacccggacggcctgaaggcgattctcagcgagtatttcggcctgccggtagagatcgaagagtacgtcggccaatggctggaactgcccgaacgcagccgcgtgagtgtgagcgccaaccgcctgggcgtggacttttgcctgggcagcttcgtgtgggaccgccagcacaaattccgtatccgcctgggcccgctcacgctggatgactacatgggcatgctgcccggccaccagccgttcaacgaactggtggcgtgggtggccgagtacctgggccatgaactggactgggacctgaacctggttttgcaacaacccgaagtcccggcgctgcaactcaacggccagttccgcctgggcttcaacacttggctcggcaaacccgagcatgacgccaacgacctaatcctggcccggcactatgccgaccacgccaccacctcaaggaatccagagcatgggtgaaatcagtcgcgccgcactgttcggcaaactcaacagcgtggcctacaaggccatcgaagccgccaccgtgttctgcaaactgcggggcaacccgtatgtggaactggcccactggtttcaccagttgctgcaactgcaggactcggacctgcaccgcatcatccgccagttcaacgtcgagccggcgcgcctggcccgcgacctcaccgaagcgctggaccgcctgccgcgtggctcgacgtcgatcaccgacctgtcgtcccatgtggaagaagctgtcgagcgcggctgggtctacggcagcctgatgttcggcgaaagccaggtgcgtaccggttacctggtgctcggtattttgaagacaccgagcttgcgccatgcgttgctgggcttgtctgccgaattcgacaagatcaaagccgaggcgctgagcgaacgctttgacgaatacgtcggtgattcgccggagaatgcgttgagcgccagcgacggtttcaatgccggtgttccaggcgaagccagcggcgcgatggcgccgagtgcgatgggcaagcaggaagcgctcaaacgcttcaccgtcgacctgaccgaacaggcgcgcagcggcaagctcgatccgattgttggccgtgatgaagagatccgccaactggtcgacatccttatgcgccgccgtcagaacaacccgatcctcaccggtgaagccggcgtgggcaagaccgccgtggtcgaaggcttcgccctgcgcatcgtcgccggcgacgtgccgccagccttgaaagacgtggaactgcgcagcctcgacgtgggcctgctgcaagccggcgccagcatgaaaggcgagttcgaacagcgtctgcgccaggttatcgaagacgtccaggcctcgcccaagccgatcatcctgtttatcgacgaagcccacaccctggtgggtgccggtggcgccgccggaacaggtgatgccgccaacctgctcaagccggccctggcccgtggcaccttgcgcaccgtggccgccaccacctgggccgagtacaagaagcacatcgagaaagacccggcccttactcgccgcttccaggtcgtgcaggtcgccgaaccgtcggaagacaaggcgctgctgatgatgcgcggcgtggcctcgaccatggaaaaacaccaccaggtgcagatcctcgatgaagccctggaagcgtcggtgaagctgtcccaccgctacatcccggcgcgccagttgccggacaaatccgtgagcctgctggacaccgcctgcgcccgcgtcgccatcagcctgcacgcggtgccggcggaagtggacgacagccgtcgtcgtatcgaggcgttggaaaccgagttgcagatcattgcgcgtgagcatgccatcggtattgcgattggtgcacgccagaccaacaccgaggcgctgttgaatactgagcgtgagcgtctggcgaccttggaaagccgctgggccgaagagaaaaccctggtcgatgagttgctggcgacccgtgcaacgctgcgcgaaaaagcaggcgttgtggacagcggcaacgatgagttgcgtgctcagttggtcgacctgcaacagcgcctcaccgaactgcaaggcgaaaccccgctgatcctgcccaccgtggattaccaggccgtggcctcggtggtcgctgactggaccggcattccggtcggccgcatggcgcgcaatgaattggagacggtgctcaacctcgaccagcacctgaaaaaacgcatcatcggccaggaccacgccctgcagatgatcgccaagcgcatacagacctcccgcgccggcctcgacaacccgagcaagccgattggtgtgttcatgctcgccggcacctcgggggtgggcaagaccgaaaccgccctggccctggccgaagccatgtacggcggcgagcagaacgtcatcaccatcaacatgagcgaattccaagaggcgcacacggtgtcgaccctcaagggcgcgccaccgggttacatcggctacggcgaaggcggcgtgctgaccgaagcggtgcggcgcaagccctacagcgtggtgctgctggacgaagtggaaaaagcccacccggacgtgcacgagatcttcttccaggtgttcgacaagggcgtgatggaagacggcgaaggccgggtgatcgacttcaagaacaccttgatcctgctgaccaccaacgccggcaccgagctgatttcccacgtctgcaaagacccggcgaacatccctgagccggaagacatcgccaaggccctgcgccagccgctgctggagatcttcccgccggccctgctcggccgcctggtgaccattccgtactacccgctcagcgacgagatgctcaaggcgatcacccgcctgcaactgaaccgcatcaagaagcgcgtagagaccacccacaaagtggccttcgactacgacgacgcggtggtagacctgatcgtctcgcgctgcaccgaaaccgagagcggcgggcgcatgatcgataccatcctcaccaacagcctgctgccggacatgagccgtgagttcctcacgcgcatgctggagggcaaggcgctggcgggtgtgcgcatcagcagccgggataacgagctgcattacgacttcagcgattgacctgtcgaaatgtgattaaaattgtgggagggggcttgcccccgatggcgtcgggtcagccagaaatttctaacctgatacaccgctatcgggggcaagccccctcccacacttgattcggtttcttcagttatcaagtcatttacgggttaaccgatgctattcaaccaagcctcacgcctggccaagatcaccagccccctcgggccggatgtgctgctgctcaatgaaatgggcggcggcgaagagctgggcaggctgttcagttacgagctgcaactgacgtccctggacgccaacatcgacctcaaccagttgctcggcaaacccatgagcgtgggcctgcaactggcggacggcggtgaacggcacttccacggcatcgtcgcgcggtgtagccagaacatcgaccagggccagttcgccagttaccaggtgaccctgcgtccgtggctgtggctgctcagccgcacctccgattgccggattttccagaacctgagcatcccgcagatcatcaagcaggtgttccgcgacctgggcttttccgacttcgaagacgccctgagccggccgtaccgcgagtgggaatactgcgtgcagtaccgcgagaccagcttcgatttcgtcagccgcttgatggaacaggaaggcatctactacttcttccgccacgagcaagaccgccatgtgctggtgctggccgatgcctacggcgcccacaccacggtgccgggctacgcgtcgatcccgtattaccccaaggacgaacagcagcgcgaacgcgaccacatgcacaactggcacctggcgcaggaagtgcaaccgggttcactggagctcaacgactacgacttccagcgccccagcgccagcatcgacgtgcgctctgccatgccgcgcccgcacaccgccggcgactacccgctgtacgactaccccggcacctacgtgcaaagcgcagacggcgaacattacgcgcgcacgcgcatcgaagccctgcaaaccctgcatgaacagatcgagttcagcggcaatgcgcgggggttgggttcggggcatttgttcagcctcaccggcttcagccgccaggaccagaaccgcgaatacctgatcgtcggttgccgctactacatcgtccaggaaagcctggaaagcggcggtggttcaggctctgcgcaatttgaaagcagcctcacgtgtatcgacgcccagcagagcttccgcccgttggccagcacccaccgccctatcgtcaaaggcccgcaaaccgcgctggtggtcggccccaagggcgaggaaatctggactgaccaatacggccgcgtgaaggtgcacttctactgggaccgccacgaccaatccaacgagaacagctcgtgctggattcgcgtgtcgcaatcctgggccggcaagaactggggttcgatgcagattccacggatcggccaggaagtgattgtgagctttctggaaggtgatcccgaccgaccgatcatcaccgggcgggtgtacaacgccgagcagaccgtgccttacgacctgccggaaaacgccacccagagcggcatgaaaagccgttcgagcaagggcggcacgccggccaacttcaatgaaatccgcatggaggacaagaaggggttggagcagctgtatatccatgccgagcgcaaccaggacatcgtggtcgaggtggatgagagccattcggtggggcatgaccgcaacaagagcatcggccacaacgagacggtgaccatcggcaacaaccgcctgcgcatcgtcaagcaggaagacatcctctcggtgggccagcgcaagaccgacagcatcagccagagctacgtcatagaagtgggcgaaaacctgcggctggtgtgcggcgaaagcatcctggagttgaacgccagcggacagatcaacctcaccggcgtgcagatcagcttctatgccagcggcgacgccgagttcaacacaggcggcgtgctgcacctgaacaacggtggcggccccggcgccacacccgatggccagggccagaaagccgccatcgacgccaatatcaaagccgcgttccccgcgcctaaaagctcctgacgagacctgttctcatgacgtatcgaatcaacgaattccagtttcaactgcccgccagcgagttgcaggacgcgacgatcaatatcctcaagttccctgaattgggcacctccctgatcgtcagccgtagcctgctcgccgagggtgaaaccctgcacagcaacttcaatgaccagctccagcgcctggaaaaacaggtacaggatctgcgttatcagccgggcgttgatgtgcgcctgggcgccgcgcaagaggtcgaaggcattgagctgcgcagccagttcaacaagggcaatgacaaggtgttccagtatcaactggcgctagtgctaccgggtacgcgcaagatgcttgccttgagttacgtgaaagccgacaagctcggggatgccgaggcggcgcattggtcgacgatcaagggctcgctcgtgttcgacgtcccccagtgaagcggcctttgcatgtctgacgcactgctctgggctgcgcgcctgggcgatgggctgtcccacacctctgtcatggcggacatcctcggcggcgtactggaggtggcggccaatgtggcgattactgcattggcgaccgctgcggtggtggcggctaccggcattaccgtcgcgaccggtggactgggggcctgcgtgctgggggcggtcgtcggcgtcatcgtcggcatcgccatgagcaagaccggggccgacaaggggttgagcgccatgtgcgaaggaatcggcaacgcgctgttccctccctcggtcatggccacgatccttagcgggtccaccgacacactgatcaacgccttgcccgctgcgcgcgcggccggcgtcgtgccctcccacgttgcacctgcgggcaccgaaaccgaagcgccgccgccagcaccggaacacagccaagagcccggctacctggacatggccaaaggattctttgcgcaaatgtggcgccccaccgtcgccacgccagcgccaggtgcagtccctaaaccgctggacgtggtgacctgcacaaaacacccgccgatgccgccgcagtttctggccgaaggctcggaaaaggtcacggtcaacggtcaaccggcggtacgcagcggtgaccgcagcacctgcgatgccaccgtggtgtcgtcagggctgatttcgcccaatgtgactatcggcggcggctcagtcgtggtgcgcgagatccgcagcggcaagacgccgggggttggcctggccgtcactgcgctgatgatgctcaaggggggtaaaggcaagttcctcagcaaccttccctgcatgctgctggcaggtgtcaattcgtttgtggtcagtcaggccatgggcgcactggccaacgccgccatgggctcttccaacccggtgcacgcgagcacgggggccaaggtgctgggcggtcccgaggagctggatttcgccttgcccggaatcatgcccatcgactggcagcgtttctacaacagccgagatgaacgccgcgatggcttgtttggtgccggctggagtgtgccctatgaagtcagcgtgcagctgctgcctcactctgaagggggcgactacgcgttgtacatcgacgagcagggtcgacgtatcgacatgggttcgatccctttgggcggtgccgtgttcagcgctggcgaaggcctcagcgtcaagcgtcacttgaacggccagtggctgatcgaaagcgcagacggcttgtaccggctattcgatccggcgccacaggactcatcgttgctacgcctgagccaactgggagatcgcaacgacaaccgaatccacctcgactatgccgacgatggtcgcctgctgggcctgcgtgacacctttgacctggtcagggtcgagctgacctacgacagcacttggccccggcgcgtcagccggatcgaacggctgtatcccgaccaccaccgtgaagcactgatgcattacgcctacgacgtccgtggcgacctggccgctgtacgccagtccgacgggcacgtgaagcgccgttttgcctatgatgccgggcagcgcatggtcgagcatcaactgcccagcggcctgcgttgcttctatcagtgggccagggttgacgaccgtgaatggcgtgttgtgcggcattggacggaggccggggacacctacacattcgactatgcgctggacaccggcatcacccgtatcaccgacgggctggcgcgtgtcagcattcgacactgggatgagcgacaccagatcatcgcgtccaccgatgcactggggcgaacctgggccttccggtggaatgatgaaagccaactactgggcgcaaccgaccctctcggtgggcattatcagttcagctacgacgatgccggcaacctgactgagaccctcgaccccctggggcgcagtgaatcgaccttgtggctggagcactgggcgctgccactggcggagaccgatgccgctggcaatacctggcagtaccattacgactcgcggggcaactgcattcgcgaaaccgacccgctgggcaaccgcacggtctatcactatgacggacacggccaggtcagggagatcatcgacgccagcggcaagcgcaagaccttgcgctggtccccactgggtcaattgaccgagcacaccgactgtacgggcctgaccacccgtttgagctactgcaagcgaggcttgctgctggccagtaccgacgcgctcggggaacgcaccaccttcaagtatgacgaccagggccgcctgatcagcaagcagttgcccgatgggcgcaacgagcactatcagcgtgacgtcagcggccagttgatcggctacagcgaccctgccggccacaccacgcgctttgagcatgcgtcgaacggccagttgcgccaacgcatcgacgcccatggccgccgtgtggagttgagccacgacgcctatggccgcctgcacagcctgaccaacgaaaatggcgagcgctaccgattcgactgggacgacggtgatcgcctgaccctcgaacagcgcctggacggctgccggaaacggtacacgtacgacccgctggacaatgtcacacaggtagaaaccctcgcatcgtccgacaccgagcccgccatcattcatgatctggagcgggacgcagctggccggctgatcgccaagcgcaccgtggatggctgcacgacgtaccgctacgatgagctcgaccaagtcacagccatcacctttacaggccacgacggcgagcagcaaaccctgggcttcggttatgacgccctcggccagctgacccttgaacaaagcgccgccggttgcctggagcatctctacgacgaattgggcaacctggcccagacccgccttcccgacggccgctggctcaaccgcctgcgctacggtagcgggcacttgcatcaggtcaacctggatgggcaggtcatcagtgacttcgagcgcgaccgtctgcatcgcgaagtgctgcgcacccagggccgcatcagcacgcgttgcgaatatgaccgcagtggacgtctgcgcgcccgccagcgccgccaaccggaccattcactgttacatccaccggcgcagacacgcctgggctatgacgacagcgaccaactggtcgaacgctacgacagccagcccggcgcggcacaccgccaattactgcattacgacgccaccggccgcattctggctagccaggacaacctcttgggccaacgggaagccttccgctacgacccggccgccaacctgttggatggctcaggacaggtcgcccacaaccgattgctgacctaccaggacaaacactaccgctatgacggttttggccggatggttgaaaagcgcagccttcggcgcggcacccagcgcttcagctacgacgcggagcaacggctggcacaggtgcataacgatgacggctcccgggtcgtcatgacctatgacccgctgggccgacgcaccgccaagaccacctacgactgcaacggtgtgcagcgcagccagacacgtttcacttgggacgcgttgcaactcgtgcaggagcactgcaatcagcagagcagcctctatatctatgccgacgagggctacgaaccactggcccgtgtcgacggcatgggtcacctgcaaaaaatccgctactaccacaacgacctcaacggattgcccgaacgcctcaccgagagcgacggccatacggtgtggcaagcgcgctatgaagtctggggcaataccgtcgaggaaagccgagaaccctacttcatcgaagaacagaacctgcgtttccagggccagtatctggaccgggaaacggggctgcactacaacactctgcgcttttatgacccggatatcgggcgcttcaccacacccgatcccatcggtctggccggcggcctgaatctctaccaatatgcgcccaacccgctgagctggattgacccgttgggcctgatgaaatgctccagcccacccaaggggcgcaaggtcagtcgcaccgtgtatcggttcgaggaaccggggcgcatcgggaccacttggcaggcacacaagtggaatgtggagtccacccaccgctacaccaccaaaggcgtcggcggggtgtatggcgcgaactcacggaaaaccgcgctgggcgaggtcacgcactggaaggtcgacctgtccaaacgggtgttggtcagcaagaaagtgcagctcaataatgtcctggatctgacccgcgccgatgtgcgcaaacagctaggggtcagccttaaaagcatcaccggctcgaagtacaccgagacccatcagatcggcaattgggccaaggccaacggctatgatggaatcctggcgccatcggcacgcaacccgaccggcagcaacttgatctcctttgcaggtttttgaacatggaacgactggaaaacgaatacccgggtgacgcggactggcagagcacagtggccctgtatgaagaggactaccttgacgacgatgcgcgtgaactggccaaggccttgggcggccatctcgacctggcagtgatactgcgtggaaaacgaggccttgaagaggggttgtggtggatcgggcaaaaggttccggcactcgacaacctcaccccgctggagtgcctggaaagtcccacgctgataaaacgcttgaagacagcactgatgcgcatgccataacacccaaggacacggcgactatggaaagttgtgcgttcaattcaatcagacacaggagtgcagtgcgtgtctgatgcactctgggcggcccggatgggcgatgcgctgactcacacctcgatgatggcggacatccttggcggggtgctggaggtcgcggccaatatcgcgatcacggctgtggcgacggcggctgtcgtcgccgccactgggattaccgtcgccaccggtgggcttggctgtttcctgcttggtgcagtggtgggcacgattgtcggcctggccatgagcaagaccggggccgacaaaggcctgacgaatttatgcgatacgttcgccaacgcgctgtttccgcccacggtgcaggccaatattcttaccggcgccaccgacactctcaccaacaacatcccggccgcccgcgccgccggggcgatcagttcccatgtcgcgccggccgggaccgaactggaagaacccacacccgagccggaagccagctatctggatatggccgaaagtttcttctcgcagatgtggcgccccacggttgcaaccccggcgccgggcgccgtgcccaagccgctggacctggtggtgtgcatgaagcacccccctatgcctccgcagttcctggccgagggctcggataaggtcatgatcaatggccaaccggcagtgcgcagcggtgatcgcagcacctgcgatgcaacggtggtgtcgtccggcctgatttcctccaacgtgaccattggcggtggctcggtggtggtgcgcgagattcgcagtggcaagacgccgggcgtggggctggcggtcacggcactgttgatgctcaagggcggcaagggcaagtttttcagcaagttgccgtgcatgttgatcggcggcgctacgtcgatggcggtcagcagcgcgatgggggccgtggcgaacgcagcgatgggctcttcgaatccggtgcatgcggccaccggcgcgaaggtgctgggcggcgatgatgagctggatttcgtcctgcccggcatcctgccgattgattggcaacgcttctacaacagccgcgacgcacgcacgggcagtcttttcggcgcaggctggagcgtgccgtatgaagtgtgcgtcgacatccagcctcaccccgatggcggcgaaacgctggtctacaccgatgaacaaggccgccccatcgacatgggctcgattcccttgggcggcgccgtgttcagcgcgggtgaagggctggccgtgcggcgacatctcaatgggcagttgctgatcgaaagcgatgacgggttgtatcgcttgtttgaaccctctgccaacccgtcgttgctgcgccttagccagctcggcgaccgaaatgacaaccgcatccaagtcgactacgacgccgccgggcaactggtgcgactgcgcgataccttcgacctggtgcaggttgagttgatccgtgatcagggccagttggcgcgcatcgaacgcctgtaccccgatcagcgccgcgaagtgctcgtcagctatggcttcgacgcgcagggcagcctggctgaagtgcgcgataccactggccaggtccagcggcgtttcgcctacgacagtggccagcggatggtggagcatcaactgcccaccggattgcgctgcttctatgagtgggccttggttgaagacctggaatggcgcgtggtgcggcactggaccgacgaaggcgacgcctaccagttcgactatgacttgcaggccggtatcacgcgaattaccgatggcctgcaacgcgtcagtacccggcattggaacacccaacaccagatcattcgatacagcgacaatctcggccacacctggctgttcgaatggaacgacgagcgccagttgctcagtgccactgatccgctgggcgggcgctttgcatacagctatgacgaggccggcaacctgatcggcgaaaccgacccgctagggcgcagcgattcgaccttgtggcttgagcactgggcactgccactggtggagaccgacgccgccgacaatagctgggcgtatcgctacgatcagcgcggcaactgcatcgccgaaaccgatccgctgggctacgtcacccgctaccgctatgacgaccacggtcaggtcgtggaaatcatcgatgccaccggcaaaagcaaaaagctgcgctggaatccgttcgggcaactggtcgagcataccgactgctcgggttacccgacgcgtttcagctatgacgagcgcggctatctgcaggtcatcaccgatgctctcggcgaacgcactcaattcagctatgacgcacaggggcgcttgctcaccacccagttgccagacggtcgtatcgagcagtaccagcgcgatacgagcgggcaactggtgggttacaccgacccggccggacataccacgttgtaccagcacaaccgtcgcgggcaggtacgccagcgcatcgatgcccatggccggcaagtgcagttcggctatgacagctatgggcggttgcaggcactgatcaatgagaacggcgagcgatatcgtttcgcgtgggacgctggcgatcggctggttgagcagcaagacctcgatggcagcgccaagcgctacgattacgacgcgttggataatgtcacgacgctgacggccgttcccgcgccttacggcaatggcctggcgttggtgcccgacataccacccgcgcctatcgtgcatcgactcgaacgcgatgcggtcggccggttggtgaccaaaaccacggacgatggccgcaccgagtaccgctacgacgagctcgaccaactcactgctgtcaccttcaccgacctgcaaggcaacgcccaggccctgggcttcgcctacgacgccctcggccagttggtgaccgaacaaagctcggcaggcggcctgcaccaccactacgacgagctcggcaacctgatccagacccaactgccggacggccgctggctcaatcgcctgtactatggcagcggccacctgcaccagatcaacctcgacggccaggtcatcagcgacttcgaacgcgaccgcctgcaccgcgaagtgctgcgtacccagggccagctcagcacccgcagcgaatacgaccgcagcggccgcctgcgcgcacgtcagcgtcgtcacgccggtcaatccaccttgctgcccgctgcggcgcaaaaacagttcgagtacgaccccgccgacaacctgatcggcaaactcgaccagcagcccgccacgcaacaccgccaactgctgcactacgacgccaccggccgcatcatcgccagccaagacagcctgcacggccagcgtgaaaccttcgcctacgacgccgccgccaacttgctggacggcccgcaggctggcgcggggttggtggtgcataacaagctgctgacctatcaggacaagcgttatcgctatgacgcgtttggccgcacgattgaaaaacgcagcgccaaacggggcgtgcagcggtttgcctacgatgctgaaagccgcttggttgaagtgcgtaacgatgacggcagcgtcgtgcgaatgacctatgacccactgggccgacgcatcgaaaaaaccgagcatggccgtgacgggtatccgctgggagaaacgcagtttgtgtgggatggactgcggttgttgcaggagcataaacacagccagaccagcctctatgtttacgacgatgacggctacgaaccgctggcccgcgtcgacggccttggcccgttgcagaagattcgctactaccacaacgacctgaacgggttgcccgaacaactgaccgaggccgatgggcacagcgtctggcaggcgacttatcgggtgtggggcaacacactggaggaagtgcgcgagccttattacattgaagagcagaatctgcggttccaggggcagtacctggatcgggagacggggctgcatttcaatacgttcaggttttatgatccggatgtggggcggtttactacgccggatccgattgggtttgatggtgggctcaatttttaccagtacgcccccaatccaatatcctggattgatccatggggtctggcccccgagctttactatctgattgcgaagaaagatggcctttatgatgaaatggcgtggggccataaaaagccagttggtaaagtttatttgaagaaaggtgaagtctggaaagtcggtgaaactgtcaatccgaacaggcgatacacgcaaaagtggctcaaagctaacaacctcgcttacaaacgcgtgatggcggcccccacgaaaggcaacatgcaagtatgggaaaggctaaaaatcggaaagtatttcaaacgccgaggaaaactgcctccaggtaacaagtgcagacactgagatgaggattactttatgcgagtcgatacaacatcggactcacccagctggacaaaagtctttgaaatcactgacgagctaaatggcttgagtgagattcttgagaagaaatatccctccctcgactgggaacttgcagtctgcatgcgatgcctgcctcaggggctcgagcggaaaacattttgccgttactacaccaaagacaaaatgttcggcctggacatcgctatggacgaggaagatttcatcccgtacaaaaaggataaggccgctcaacgtaaattaatcggcgcagcgttttttgagttttttgttgagagcattaaaaaatacgaaaaaaagctccccaatcttcagccggtttcagaacaactgatcgccgatgtgaagcaatggtgtaccgaaaacgaatgggtagcctgaaatcccaaaaaaggctacggggtgccccacaaaaaatgggcacccaaccccgtcggcgtgcccatttttcctaccaccccgcccccttcgagacggtaacgctcttacgcgttaacagtgtctttcagcgatttacccggcttgaacgcaaccgtgttgctggccttgattttcaccggctcaccggtttgagggtttttgccagtgcgagcgccacggtggcgttgcaggaaggtgccgaagccaaccagggtgacgctgtccttgcggtgcagggcgcctgtgatttcttcgagaacggcgttgaggacgcggttggcctgttctttagtgagatcggctttttcagcgatggcggctgcgagttctggtttacgcataagtgaagcctctttgacggttttttgttgttatgtccgtgctgctctcttctggagcagcgcccaaagcgccgcaggctctactctgcggcagacgggagtgaggatggcatgccctcgcacgctccgccagtctagcggcgacctttctggagggaaaaacgtgcttattccgacagaacgaccggtatttacgccagcaacggcggaagttctttgttgagggccagtttttccatcacggcgctcccagtcagtgcgtaacccagcaggcgaccgctggcgtcacggcacagggccttgatgtcggcgccctcgccttcgacgctccagacaccttcggtgcctcgtggcggtggcgacaccaccagcgggcagatcggggttttcacggtcaccggcattgggccgtagctgacggcggtggcgtttccggccagggtctgagccagggcgcgggcgcagctcatcagcggcatcacgtacagcaggttcaggccgtcgacctcggcgcagtcgcccagggcgtagatgttggcgtgggaggtcttgaggtggcggtccaccatgatcccgcgattggtctgcaggcccgcggcggcggccaggtcgacgcgggggcgcaggccgatggccgagaccaccaggtcgcaggcgatcacttcgccgtccgacaggtgggcttccaggccatcagcgttgcgttgcaggcgattgagcaccgggcccaggtggaagcgcgcgccgaggccttcaaggcccgcctggactgcggcggcggcagccgggtgcagcagggtcggcatgacctgctcgcacggcgccaccaggtcgatttcataaccgcccaggatcaggtcattggcgaactcgcagccgatcaggccggcgccgagcagcagcacgcggcgcttgccggcagcggcagcacgaaagcgtgcgtagtcttcaaggtcgttgatcgggaaaatcaggtcagccgcatcgccttcaaccggcacacgcacggtttccgcgccccaggccaggatcaggtcgcggtaggccaccgcttcttcgccgatccataggcgtttgtggccggggtcaatgccgctgacgcgggtatgggtacgcacttcggccttgagttgctcggccatggcgccgggttcagccatgctcaggccatcggcttccttgttcttgccaaagccggtggagagcatgggcttggagtaggagcgcccgtcatcggcagtgatcagcagcaatggggtctcgctgtcgagcttgcgaaactcccgggccaggttgtaaccggccaaccctgtgccgatgatcacgacaggtgcgttcattcctttctccttgtaatacttttctgaaaatcgagaatcagccgatttcgatcatttcgaaatccattttgcccacgccgcagtccgggcacagccagtcttccgggacatcttcccaacgggtgccaggcagaatgccgtcatccggccagccatccttttcgtcgtagatcagcccacagacgacacattgccacttcttcattacttgcttcctcagggtccaggcatcttggccgacggtcgatagacccgcgttgccgtacggctcagggcgttttgtactgatcgtggccggcagatgcaagcatgatcgacgcaaacagccggttgcgtccggcaaaaaccctgatcgccatggtaagctcgccgcctcttttgctgccgatactgactcaccgtgccgcactcaatcgaccctgccgatgcttgccaatggctgccccagagccttctgagccccatacccgggccctcgacccttgattggttgttcgatacaggctcgatgacccagcggttgacccagctgtcaaacaacggcttcagcatcaccccgctgttcgagggttggcagccgctgcgggatgatgaatgcgtggcccttggcctgccgctggcgacagttggctgggtgcgcgagacctatctgcatggcaatggccaaccctgggtattcgcccgttgcgtagccgcgcgcagtactttgcagggtgacggcttgcacatggatgcactgggcagccgcccgctggggtctctcctgttcagcgatcatgcgttcaaccgccaggccatcgaagtgtgccgctaccccagccagtggttgcctgcggaccaccagattgaagggctttgggcgcgccgctcgcgctttgatcgcggcccgctgagcgtgctggtcgcagaagttttcctgccgggcctgtggcaagccgtgcacaaccatgcggagaattgctgatgtatcaacgtctgctcaagtccttgaaccacctgaaccccagggcctgggatttcattcagttgacccgcatggacaagcccatcggcatctacctgctgttgtggccgacgctgtgggcgctgtggatcgccggcaaaggctcgccctctttaatcaatatcgtgatcttcgtgctgggcgtggtgctgactcgcgccggcggctgcgtgatcaatgactgggccgaccgcaaggtcgacggccacgtaaagcgcaccgagcaacgcccactggtcagcggcaagatcacttctaaagaggcactggtgttttttgcggtgctgatgggcatcagtttcctgctggtgctgctgaccaacgccaccactatcctgctgtccctcggtggcctggcgctggcggcgagctacccgttcatgaagcgctacacctattacccgcaggtggtgttgggggcggcgttttcctggggcatgccgatggcgttcaccgccgagaccggcagcctgcctgccaccgcgtggctgctctatatcgccaatctgctctggacggtcggctacgacacttattacgcgatgaccgaccgggatgacgacttgaagatcggtgtgaaatccaccgccattttgtttggtgatgccgatcgcgtgatcattctgacgctacaagggctgtcgctggtgtgcctgttgctggcgggtgcgcgattcgagttgggtggctggttccacctgggtctggtggccgcggcgggctgttttgcctgggagttctggtatacccgggacaaggaccgcatgaagtgcttcaaggcgttcctgcacaaccactgggcggggttggcgatatttgtcgggattgtgctggattacgcgtttcgctgaggattttgtggcggctgtcgcgacctcatcgggggcaagccccctcccacagttggaatgtgttcgcctgtaggagggggcttgcccccgatgctttcagtggcgccgcgtgatcaaggtttggcgaccttccaggccccgtccattttgccctcaccggtcatgtcgcccgctttcttgtccatgatgaaggtatagagcggcttcccgctgtatgcccattggcttttttgatcgtcacgggtgatgacggtccatttacccataggcttgtcggtggattcggccatcagtgggggccagttggtggcgcacttgtcgttgcacatggacttgccatcggcgtccttggcaaaggtgtagagcgtcatgcccttgtgatccaccagcatcccgtctttggtcatcgccggctccgccgcgaacgccaggcccggcagcgtcaatgccgccgtcaccagcagggctttccaggaaatcgtgctgtaagtcatcggaaccttccttttgtggttgtcaggattcggactcaaagcgtagtccagagaggcgggaattgcccgagcgactaaattactgtcacacgactgcaataattccgttatctaatgcggcgcaagacagttaaatgacaagaggattttcgagcatggttggcaggagcattctgattgttgacgacgaagcgcccatccgcgagatgatcgccgttgcgttggaaatggccggctacgactgcctggaggccgagaactcccagcaggcccatgccattatcgtcgaccgcaagccggacctgatcctgctggactggatgctgcccggcacctccggcatcgaactggcccgccgtctcaaacgtgacgagctgaccggggacatcccgatcatcatgctcaccgccaagggcgaagaggacaacaagatccagggcctggaagtgggtgccgatgactacatcaccaagcctttttccccacgggaactggtcgcacgcctgaaagccgtactgcgccgtgccggtcctaccgatggcgaagcgcctatcgaagtcggcggcctgctgctggacccgatcagccaccgcgtgaccatcgacggcaaaccggccgagatgggccccaccgaataccgtctgctgcaattcttcatgacccaccaggaacgtgcctacacccgtggccaattgctggaccaggtgtggggcggcaacgtgtacgtggaagagcgcaccgtggacgtgcatatccgtcgcctgcgcaaagccttgggcgatgcctacgagaatctggtacaaaccgtgcgcggtactggttaccgcttctctaccaagggctgagccaatcgcagcctgacttaacagctgacaaggacgcatgttcaagtgaaccaaaactggcatggcaccctgatccgccacatgcttttgctgatcaccggctgcctgctggttggcctggtcagcggctattacggctggagcctggcagtcggcattgccctgtacctgggctggaccctcaagcaactgctgcgcctgcacgaatggttgcgccagcacaaacccgacgaagcgccacccgatggctacggcctgtggggcgaggtgttcgacagcatctaccacctgcaacgccgcgaccagcgtgtgcgcgggcgcctgcaagcggtgatcgaccgggtgcaggagtccaccgccgcgctcaaggacgcggtgatcatgctcgacagcgacggcaacctggaatggtggaaccgcgccgccgaaaccctgctgggcctcaagacgccccaggacagcggccagccggtgaccaacctggtgcgccacccgcgcttcaaggagtacttcgaacaggagaactacgaagaagccctggaaatcccctcgcccaccaatgaccgcgtacgcatccagctgtacctgacacgctacggcaacaatgaacacctgatgctggtgcgcgacgtcacccgcatccaccagctggaacagatgcgcaaagacttcgtcgccaacgtctcccacgagttgcgtacaccgctgacggtgatctgcggctacctggagacgctgctggacaacgtcgacgagatcaacccccgctggagccgggccctgcaacaaatgcagcagcaaggttcgcgcatgcagacactgctcaacgacctgctgttgctggccaagctggaggccaccgattacccgtcggacaaccacccggtggcggtgcagagcctgttgcagaccatcaagaacgacgcccaggccctctccggccaacgcgggcagcagatcaccctggaagccgacccggccgtattgctcaagggcagcgaaggcgagttgcgcagcgcgttttccaacctggtgttcaatgccgtgaaatacacccaggacaaaggcaatatccgcatccgctggtgggccgacgaccaaggcgcgcacttgagcgtgcaggactccggcatcggcatcgacgccaagcacctgccgcgcctgaccgagcgtttctaccgtgtcgactccagccgcaattccaacaccggtggcaccgggctcggcctggcgatcgtcaaacacgtgctgctgcgccatcgcgcacgcctggaaatcagcagcgtgctgggacatggcagcacgtttacctgccattttccgccggcgcagatgacgcgttcgcgagccctcagcaacgacgagtaatccaaatacaccacgggcctaaatgtgggagggggcttgcccccgatggcggcgggtcagatatgaatgcgctgcctgacatactgccatcgggggcaagccccctcccacaggggaccggtgttgttttagagagtgcattccagccccgcccggcagtgggcactaggcaagcgccccgtcagccgctacattggccgacttgcgcctgcctttcaggcccacctgccaccccttactgaacatacggaacctgcaaaaccccatcatggacccttcccctggtatcaccctcgcgacactcttcgccgacttcggcatgattctttttgcactggtcctggtactgctcaacggtttcttcgttgcggcggaatttgccatggtcaagctgcgcgccacccgggtcgaggccatcgcccacaaaaacggctggcgcggacagatcctgcgcaccgtgcacagccagctcgacgcctacctgtcggcctgccagctgggtatcaccctcgcctccctgggcctgggctgggtcggtgagccggccttcgcgcatatcctcgagccgctgctgggcgccgtgggcgtcgagtcgccggaagtgatcaagggcgtgtcgttctttgcggcgttcttcgtgatttcctacctgcacatcgtcgttggtgagttggcgcccaagtcctgggcgattcgcaagcccgagttgctgtcgctgtggacggcggtgccgctgtacctgttctactgggccatgtacccggcgatctacctgctcaacgccagcgccaacgccatcctgcgcatcgccggccaaggcgagcctggcccacaccatgagcaccactacagccgcgaagagctcaagctgatcctgcactccagccgtggccaggacccgagcgaccaaggcatgcgtgtactggcctccgccgtggaaatgggcgagctggaagtggtggactgggccaactcccgggaagacctggtgaccctggacttcaacgccccgctcaaggaaatcctcgcgctgttccgtcgtcacaagttcagccgttacccggtgtatgacgcggtacgcaacgaattcgtgggcctgctgcacatcaaggacctgctgctggaactggcggccctggaccacatccccgagtcgttcaacctggccgagctgacccgcccactggagcgtgtgtcgcggcacatgccgttgtcgcagctgctggagcagttccgcaaaggcggcgcgcacttcgccctggtggaagaagccgacggcaagatcatcggctacctcaccatggaagacgtgctggaagtactggtgggcgatatccaggacgaacaccgcaaggccgagcgcggcatcctggcctatcagccgggcaagctgctggtacgtggcgatacgcccctgttcaaggtcgaacgcctgctgggcgtggacctggaccacatcgaagccgaaaccctcgccggcctgatctacgacaccctcaagcgggtgccggaagaggaggaagtgctggaggttgaaggtttgcgcatcatcatcaagaagatgaaagggccgaagatcgtgttggccaaggtgctgctgctggattgaccgtcaattgcccaatgcaaagttgggcaatgcaccgaccggctggttgaactcatacggaatcgagaccagccccgcctcggtggcgcgctgcaccacaaaatgcaggtgcggcccgctgctgttgccggtattgcccgacaacgccagcggactgcccaccgccacacgctgaccgacccggacgctgaccgaaccttgcttgaggtgcaggtacacgccctcggtgccgtcgtcgtggcgcaccctcacgaaattccccgacgcatcgctgccgcgcccggcctgcgcgttttcggtcttcaccaccattccactacgcgccgcaatgatcggcgtgccttcgggcatggcgatatccatggcgtagcgacttttggcgtcggtgtggctgaagctgccgttggggccttgggtcatgcggaaggggccgccacgccagggcaaggggtagcggtaggcttgttgtgcacgattgggcccgggcacgacaagcatcggtcgctcaaccttgcgctcctggatcacaaacacctgggcgccaggcgtatgccggtcgctgataaacaccaggccattggcatcgacggatttgtagagggtcatggcctgggccgacatagcgaccgttgccagcccgcagcacagcaaaaagcgcatgagcatggcgtgaacctgccgggatgactgaacggcaggttagcgcggtttgatgacaacttcaggcaggcagcccgttgaaacaaatatccacgttcatttgggcagccgccgacaaattgaccaaggcatccagggagagtttgtcgatcttgcccgtgagaacgtcgttaagtcggggctgactgatccccagtctttgcgccgcatctttttgagaaagctcccagctgcgaatggtttggcacagctccaaaagcaattttgaacgcagccgcatattggcagcttgctggggtgtctcttccagagcgtcccaaacagagctgaaacgctcgccgtaaactttttgatttgccatgggctcaccctaactcctgcaatctggcgcgagccagctcgatatcacgcccttcggttttctgtgaggtcttgcgcagcgcgtgcaacacatagatggcctctggccggttgaccacatagaacacccgaaaagcacccgattcttcagtgatccggatctcactgacgcccctcccaatggtcttcatcggcttgcagtcaaagggttgctcaccctgctgcaagagatccaactgaaaacccactgccctccgagcatcgagcggaaacgctttgagatccttgagcgagcttcctagaaacaccacatccttgtgccttggcattggcttctcttctcctttcatggaaagaaaaagcgtaatcgacgattcggccaagagacgtggaggtttgtttcaaggcatagcaaaggctcgataacaccggagcgttatcgagagactatatcgaaacagatataaatcaaggcaggcaccgggaatcagacagtcggtcgattcccggcaatcagagaatcacgcacccggcacaaaatgcttctgtgctgtaccgcgcgcaatcaggcgggagatgtagtcgagcttctgcgcatcctggtcgataaaccggaaggtcagttgcagccaatcgctgtccggcttcggttcaaaggcgacgatggcgtgcaggtaaccattgaggcgggccacttcggcgttgtcgccttgttccaggtcgagcacggcgctttccaggacctggggcaggacttcaccgcgacgcaccaccagcagcgcttccttgatgctcagcgccttgatcacgcattgctgggtgccgctggacaggcgcaattggccctggccacgaccacccgccggcgcagccgctatcggcgcctgcaccggtgggctgttgagcaagcctttgttaggcgcaggcgcagcagcaacaggagccgcacgtgccacttcgggtttgccgccggtcagggcgctcaaggaatcgttgccgaacgccgagttcatcttggtcggcgcgctggcgaccagggcgtcgaggcggccgatcttgtgcagggcctgcttgaccttgttcagcaactgttcgttggtgaacggtttgctgacgtagcctgaaaccccggcctggatagcctggactacgttttccttgtcgccacggctggtgaccatcacgaacggcatggctttgaggtgaggctgctcgcggcaccaggtcaacagctcaaggccggacatctccggcatttcccagtcgcacagcaccaggtcgaaggtctcgcgcatcaggatggcctgggcctttttgccgttcaccgcgtcttcaagcttgatcccggggaagtaattgcgcaggcacttcttcaccaggtcgcggataaacgaggcgtcatccaccaccaatacactgactttactcatcgacccttcatcctataaaaacttcggcacgcaagacgcctgactgatggcattttgccaaaaactctgcagtcacgttgggactttcttgtgtcccctcgctgaaaaattcgcgcccgcaaacaaaaacgcccgaccaaaggccgggcgttaatttctcgggcaaccttacttatcgtcaggtacgcccggaacattagggatttgatcgactgaaccttcaacttcggccttcatgcgcttgaggcccatgtgccgtacgtcggtgccgcgcaccaggtagatcaccagttcggagatattgcgcgcatggtcgccaatccgctccagggagcgcagcacccagataatgctcaagacccgcgagatagagcgcgggtcttccatcatgtaggtggcgagctcacgcagcgcggtcttgtactcacggtcgatgaccttgtcgtactgggccaccgacagggccagttcggcgtcgaagcgggcaaaggcgtcgagcgcatcgcgcaccatgttgcgcacctggtcaccgatgtggcgcacttccacgtaaccgcgtggcgcttcgccttcttcgcacagctggatagcgcggcgggcgatcttggtggcttcgtcgccgatgcgttccaggtcgatcaccgacttggagatgctgatgatcaaccgcaggtcggacgccgccggctggcgtcgggcgagaatgcgcaggcattcttcgtcgatattgcgttccatctggttgatctggtcatcgatctcacgcacttgctgggccaggcccgagtcggcctcgatcagcgcggtgaccgcatcgttgacttgcttctccaccagcccgcccatcgccaggaggtggctgcgcacttcctcgagctcggcgttgaactgcgcggagatgtggtgggtaaggccttctttgctaatcatgttggcgtccttggagcgtccggtaaggtgcggagaaccgcagcgtcagtgcaatcagaaccacagcttcctagccgtagcgaccggtgatgtagtcttcggtctgcttcttcgccggattggtgaacagggtatcggtgtcgccgaattccaccagtttgcccatgtacatgaacgcggtgtagtcggaaacccgcgccgcctgttgcatgttgtgggtcacgataacgatggtgaacttggacttgagctcgtagatcagttcttcgactttcagcgtcgagatcgggtcgagtgccgagcagggttcgtcgagcagcaacacttccggctccacggcgatggtgcgcgcgatcaccaggcgctgttgctggccgccggacaggccgagggccgagtcgtgcaggcggtccttcacttcgtcccacaacgccgcgcctttcaaggcccactcaaccgcttcgtcgaggatgcgcttcttgttgatgccttggatgcgcaagccgtagaccacgttttcgtagatggtcttggggaacgggttgggcttctggaacaccatgcccacgcggcgacgcaactcggccacatcctcacccttacggtagatgttggtgccgtagaggttgatggcaccgtccacgcggcaaccgtccaccaggtcgttcatgcggttgaaggtacgcagcagcgtggacttgccgcagcccgacgggccgatgaaggcggtcacgcgctgcttggggatgttcatgctgacgtcgaacagcgcctgtttttcaccgtagtacaggctcaggcccggtacttcgatggccacggtttcctgggccaggctcaggctctgcttgtcgcgacccagggcagacatgttgatgccgtgggtgtgggtgtcttgttgcatgggatgctccctgtgctgttgtgtgggagggggcttgcccccgatggcagtgtgtcagtcagcacatctgtttctgatccgccgctatcgggggcaagccccctcccacatttattctgcgttcacttataaatcagctatccagcgccttgtacttttcgcgcaggtggttacggatccacaccgccgacaagttgagcgtggcgatcaccagcaccagcagcagcgcggtggcgtacaccagcggccgcgcggcttcgacgttggggctctggaagccgacgtcatagatatggaagcccaggtgcatgatcttctggtccaggtgcaggtacgggtagttgccgtccagcggcagcgacggcgccagtttcaccacgcccaccagcatcagcggcgccacttcaccggcggcgcgggccacagcgaggatcatgccggtcatcattgccgggctggccatcggcagcacgatcttccacagcgtttccgccttggtcgcacccagcgccagggagccctcccgcacggtgcggggaatccgcgccaggccttcttcggtggccacgatcaccaccggcaccgccagcagcgccagggtcagcgaggcccacaacaggcccggcgtaccaaaggtcggtgccggcagggcttcggcgaagaacaggcggtccaccgagccccccaatacatacacgaagaagcccaggccgaacacgccgtagacgatggccggtacaccggccaggttgttcacggcgatacggatgatgcgcgtcagggcgttctgcttggcgtattcacgcaggtacaccgccgccagcacgccgaacggagtgacgatcatcgccatgatcagggtcatcatcacggtgccgaagatggccgggaagatcccgccttcggtgttggcttcccgtgggtcatcgctgaggaattcccagaccttgctgaagtagaagccgatcttggtgatggtgcccatggcgtttggctggtaggcgtgcaccactttgccgatgccgatttccacttccttgccgttcgcatcgcgtgccgtcagggcgtcgcggttgaactgggcgtgcaggtcggccaggcgggcttcgatgtcctgataacgggcattcagctcggcgcggtcggcgtccatatcggcctgggcggcggcgtcgagcttgccttccagttccagtttgcggccatgcaggcggatacgttcgaggccggcgttgatcgcgccgatgtcggacttctccagagtcttgagctgggcagccagcttgttgacgcggtccacacgagcctgcagctccggccaggcagcctcgccttcggcaatgaccttgccatcctgcttgacgttgaccagggtgccgtagaagttgccccactcacgccgctcgatggtcatgagattcgctggcgtggtctggtccttgagccactcgccgacgatccaggtgaagtcgttgccgttcaggtcacggttgccgaccttgatcagctcgcgggtcatgaactccgggccttggtccggcaccggcaggccggcgcttttcaggcgctcgcggggcacttcttccttctgcaccacttcgccgatgacgatatggtttgcctggcccggcacgctgtagttggcctggatcaggtcggccggccagaagtggcccaggccacgcacggcaatcaccgccagcaacccaatagtcatgatgaccgcgatggacaccgcgccaccgctgatccagacaccgggggcgccgctcttgaaccatccattcagggagttctgtttcacagacttctacctttcttaaagcgacgagtatttcttgcgcagacgctgacggatcagctcggcgagggtgttcatgatgaaagtgaacagcagcagtaccagcgccgagaggaacagtacgcggtagtgactgccacccacttccgactcgggcatttccaccgcgacgttggccgccagtgtgcgcaggccttcgaacaggttcatctccatcaccggggtgttaccggtggccatcaacacgatcatggtctcaccgacagcacggcccatgccgatcatcagcgccgagaagatgcccgggctggcggtgaggatgaccacgcgggtcatggtctgccacggcgtggcgcccagggccagggaacccagggtcaggccgcgtggcacgctgaacacggcgtcttcggcgatggagtagatgttcgggatcaccgcgaaacccatggccaggccgaccaccagggcattgcgctggtcgtaggtgatacccaggtcgtgggagatccacatgcgcatgtcgccgccgaagaaccaggtttccaggtacgggctcatgtacagcgagagccagcccacgaacaggatcaccgggatcaaaatcgcgctttcccagccatccggtacacgcaggcgcagggattcaggcaagcggctgaagatgaagccggccaccaggatgccgatcggcaacagcatcaacaggctgaaaatccccggtagatgcccttccacatatggcgccaggaacaggccggcgaagaagccgaggatcaccgtcggcatggcctccatcaactcgatcaccggcttgaccttgcggcgcaggctcggggccatgaagtaggcggtgtagatcgcggcggcaacggccagcggcgcggccagcagcatggcgtagaacgcggccttcaaggtgccgaaggtcagcggggccaggctcatcttgggttcgaagtcggtgttggcggcggtcgactgccagacgtatttaggctcgtcgtagttttcgtaccagaccttgctccacagcgcgctccaggacacttccgggtgcgggttgtcgagcatcagtggttgcagcttgccgcccgcctccacgatcacgcggttggcccgtggcgacaggccgaacacgccctggccgtcgaccaccgggtccaccagcagggtgcggtgggcggtgctgtggaatacgccgaacttgccggacgcgtcgagggcggtgaagcctttgcggcgctcttcggcggtgatttcaatgatcggcgtggcgcccatctggaaggtacggatctgcttgaagcgctgctcgccatccgggtcgcgggccatgaaccactgggccaggccgcccttggagttaccgatgatcagcgagataccgcccaccagctgggtgctcgcggtgacttcagcattgccatcttccagcagtttgtagcgtccattgaggctcttgtcgcgcaggctgaacacatcggccaaagcacggccgttgatcacgtacagccattgctgacgcgggtcgatgaagatcgccttcaccggctcggtcatttgcggcagctcgatacgcttctgctcgctggtgacttcgccggtcatcatgttttcttcgcggctcagggacagcacgttcaagtgcgaaccggcggagcctgccaccaccagggaggagtccgtggcgttgagggccacgtgttccagcgggcggccggcgtcatccagcacgatcggcgtttcaccgtaggggtattcgatcgcgggggtgatggttttcttgccgtccgggtaggacaccttataggtgtggcggaacaccagggactggccgttggacagaccgaggatcaccagcgggctgccgggttggtcttcgccgatagaagcaacactggtgccggcgggcaggggcaggtcgacacgcttgagttcggcaccggtctcgacattaaagaacagcgcctggcccttgtcggaaacccgcatggcgacttggttctgttcttcgagggagatcatcagcggcttgccggcgtcctggatccaggccggggtcagggcgtcttccttggtcaacgaggcgccctggaacagtggcgcgaccacataagccaggaagaagaaaatcagggtgatggcgccgaggacggcgaggccgccgaccagcacgtaccaacgggtcaggcgatccttgagcgcgcgaatgcggcgcttgcgttgcaactcaggcgtattgaagtcaatgcgcttggggggagaagtcgtcgtcatggtggaattggccagatcattcatgcgcacaccctagcgatcctgtatgacagaaagatgacagtgcagtgacgcaacaaatccgccgcgaagcaaggctggcagcggactagaaaattcggatgcggggccggtacgccggccccgcagaggcaatcagttgccttctttcagacccaggtcagccaaggccttggcggcgactttggctggcagcgggatgtagccgtctttcacgacaacttcctggccctgtttggacagaaccagcttcacgaactcggcttccaacggggccagaggcttgttcggagctttgttgacgtacacgtagaggaagcgcgacagcgggtatttgccgttcagggcgttttcttcgctgtcttcgatgaagtcagtgctgcctttcttggccagagccacggtcttcacgctggcggtcttgtagccgatgcccgagtaaccgatgccgttcagcgaggagctgatcgactgcacgaccgacgccgagccgggttgttcgttcacgtttggcttgtagtcgcctttgcacagggcttcttccttgaagtagccgtaggtgccggacaccgagttgcgaccgaacagttgcaccggcttgttggccagatcgccggtcacacccaggtcgccccaggttttcacgtcggctttgccaccgcacaggcgagtcgaggagaaaatcgcgtcgacttgttccatggtcaggtgctggatcgggttgtccttgtgcacgaacaccgccagggcatccacggcaaccggaatcgcggttggcttgtagccgtacttctgctcgaaggccgccagttcggtgtccttcatcttgcggctcatcgggcccaggttggaggtgccttcagtcagcgcaggtggcgcggtggccgagccggcagcttgaatctggatgttgacgttcgggtattcctttttgtaaccctcggcccacagggtcatcaggttagccagggtatcggaaccaacgctggacaagttgcccgacacaccagtggtcttgacgtacgccgggattgccggatcaacaccagcggccaccgcgttggcggtcgcaacgccagcagcgacaaaagtcattgccgccatcaaacgtttcagtttcatgccttgctcctagcagattgggataattggatcggggccaagtatcgggaggccgtgtgaacactctatgtctggaatgtgacagttagatgaaaggccactattgggtgaggatttgcatttaagaagaaattttcagaaatgccggcctgagcgggaagataagtgtgataaggctctggcttgaaaccatgctgcaattgctgaccggagatttcccacagctttttagggttgtcgctcggaactggccttaataacctcctcctgccgctgcaaattcagcgaccgggactgcaagcccgccgaaactatgttgggagttcataagcgcctctataatcggagcgcttttatggccgtcgctttatggcggctgtgtgcgggagaccttcgggtctgccgggatgctcctaacctcggtcttgcagacccgcgcacagctgccacccatcatctgcaagtgatgctggccgctcccattttgttaggagcttttacgatgatcaaagatagccccaatcccccgctcaattcggctccactgcacgcagacgctcacagagccatcaattccaatccgacacgttctgctgaatccaccctatctgctgatgggctttttaccgtgcgtacagatctggatgccgagaccctgctggcaaacgcgtcccaggatctcacctcggtacaagtcttggctgcaaatttggcgttcgaggtcgacggtgctgcgcgagacgtggcgctgggaatatgccggatgcttgagggaattcagttattggtagatcggacgctggatcaatttgaaactcaaaacccgatggcaaaattatgaaatccgctccggtccaaagcctggttaaagtctgagcgattcacggcgaaccttaggttgacaaaacaaaaccaaagcatagtcttgtcaacctaaggagacctcacatgatcaatgaccgaattcgccgcgcaaggttattgcgtggcatgtcgctagaagcactggcactgcatctcggtgacataaccaagcaaggcctgagcaaatatgaaaaagggctgagtaccccaaactctcagcgtcttttgcaattagcaaaggcactggacgtgagcccggagtattttttccgcactcaggcactcccactcgcgccgctcgagttccgtaagcttgcgaagatgcctcagtaccgtcaggttcaagtcgaggagcagattcgagagcatctggaacgctatatatctcttgaagagtgtttcgacccaggagatatcaagactgccgaaaccccagcgcaaatgctccctgtgtcctccttagaagaagcggaacgagcggcggatgagctccggaagtattgggatataggcgaggaccctattgctcatctgactgagcagttggaagagcacggcatcaaagtggtgatgctggatggtcctgatgattttgatggcgcttgcgcagccaccaatgacggcgaacatgtgctgatcgctctaaatgctcagagagcaggtgaacgaattcgcttcaccgctgctcacgaattgggtcactgggtgatgaaattgcctgatgatatgcccgagcgcgataaagaaaattgctgtcaccgcttcgctggggctttcctttatccagctaaaagcgtgaccggagattttgggaatcaccaacgctcccgtgtccaccctagagaactattgattgctaagcgccaatatgggctctcaatgcatgcagcgctccgtcgattgaaggaccttaagctattaggcgaaggcggcttcaagtccctgactattcagttcagtagcaatggctggcgcaaagcagaacctgaaccattaccttgcaaaccacctcagcgttttgagtctctcgttttctgggggttagcggaaggtctgatcaccaaatcaagagcggccgagttgctgcgtcgcccggtgagagctctagatcccaattttctgggctcattggagagtgcatgagccttatctatatcagcgacaccaacatctggattgatttcaggaatgcgggattgctggagcatatattcaggctgccactcactttctgctgcaccgactttgtcatgcacgagcttgaggatttcccccatgatgaactactcacccaagggttggttgtcgaatcatttgacgagggaggagtgaaaaaactcttagggcttaaggtcgaacacaataatagttccttagccgatgtttcttgctacctactagcacaaacaaccggaaggccgttactcactggcgatggaaaactacgtcgtcaggccattcgggatggactacaggtacacggcgcactttggctgctcgacctaatggtcgagcatcaagtcctcaatgctattgacgcagcaacggcgttggagcatatgctaactgatggcgcccgcttaccagcatcagaatgtcaaataaggctcttaggttggagacctatatgaagctcaacccggatactgaatatccacccagcggttgtaaacatcaccatactcaccttccaaagcagaaaacttagtttcaaaaagctccatggctttgattgcgtcagctgacggataactcatgaagcgataccccgtcattaccctaaatttgaaatatccgaatccgtctgaaattattcgactgagatgagccaaatgaattgagtccctttcatcggcgcctcggaagtctcgctccatcggcattccaaccccaatgcagtcagcatgatgtatatgactagcgttcgagtattcatgtagcaacgctgcataacctttaaacaacgggtcgccactattcgtgagaccggcaatcaaaccagtgaacccccatctgcgctcaagttcttgacgagtttttctatcatatttctgatttacttcagctcttttttctggcgaaattaaaagatccttgatgggtttccactctcggtcatcaggattcgtcacagaattcaaaagctcttgagccttactatcgtttttcaataatgaaatttcaaaaaggtcagtatcaaactcttcaattcgccgcctaaaactctcacgcgactggagtatatacaatactttcagtgtaccctcgcacaccgaacgcatgattacatccgcatcccaaagttgaccgtaagcagacaataaaaatgcgctttccgtagatcgcgctgtcgccgataaaagctcaccgagaacttgccgttctcgcttgctgaattcagaaaaagctgacactggaaccattagtggcagcaactccctcattaacaaaaccgctttttcggaccactctttctgaattttaattagtacttccgtgtacatagactactcctgaacagactaccgtccgcgcttccacagatacccacccaccaccatccccatcacgcacagggcggcaacgtagtaggccgggcccatcgggctttccttcatcagcagcgacaccaccagtggcgtcagcccgccgaacacggcgtaggccacgttgtaggagaacgacaagccactgaaacgcaccacgggcggaaaggccttgaccattacgtaaggcaccacgccgatggtgcccacaaagaggccggtcagtgcgtacagcgggaacagccagtctgggtgggccatgaggctgtgatacagcgtccaggatgtggccagcaacagtgcgcaaccagcgaccagcacacggcccgcaccgaagcggtcggccagggcgcccgaagcgatgcaacccaggctcagggtgacgatggccaggctgttggcctgcaacgcaacggtcgggctgaagtggtagatggtctgcagcacggtcggggtcatcaggatcaccaccacgacgccagccgacagcaaccaagtcagcaacatcgacaagacgatggcgccacgatggtcgcgcagcaccgcgcgcaagggcagctcggcggccagggtcttgcgttgctgcatctcggcgaagatcggcgtttcatgcaaccagcggcgcaggtacaccgacagcaggccgaatacaccgccaagcaggaatgggatacgccaggcataatccgaaacctgctcagggctataaatagtgttgatggcggtggctaccaatgagcccagcaggatgccggcggtgaggccgctggtgagagtgccgcaggcgtagccgatatggcgtggcggtacgtgttcggagacgaacacccacgcgcctggcacttcaccgccaatggccgcgccttggatgatgcgcatcagcagcaacaggaccggtgcccacaggccgatctgcgcgtaggtcggcagcaggcccatgatcagggtcggcacggccatcatgaagatgctcagggtgaacatcttcttgcggcccagcaggtcgccgaagtgcgccatgatgatgccgcccagggggcgcgcgaggtaaccggcggcaaagatgccaaaggtctgcatcatgcgtagccattcgggcatgtcgaccgggaagaagagttttccgaccacggtggcgaaaaacacgaaaatgatgaaatcataaaactccaacgccccgcccaaggcagacagcgacagggttttgtagtcgttgcgggtcagcgggcgcgacggttgcgcactgcttgcgggcacggaggacatggcaaggcttctcttatagtagtcgggacggcaagcccgggacttgcggcaggcttggcaagatagcaaatcgctcgaaaaagcacagcgttgagcgaataacagttcaacagcgcgaaatattccgcatttttacgctttatctgcgcacagaagcacagttgccggaaaaagccgcgatacagccgttatttgccgaccaaatgagcgcccagaggtcgtcgtggcgccggggtctcgatatactcggcccgtgcaagcgcaagacccccagtcttgaggggctgctgtgccaaaacgtcgttgggcacccaccagccgatttggcagagtttccctttagtacgccttacgagaaacgcatcacgcggtgtatgttggtgctgaaacgtttttttcgaagacggctatccacttgaaatacccatgaagcgttacgggtcagaggcacccttggcatgatcgaactcgaacaagaagatcctatcccgcaaggcgatctcgccctgcaaatcaccgccctgccgcgtgaaaccaacggtttcggcgatatcttcggcggttggctggtcgcacagatggacctggccggcaccgccatggccagcaaggttgcaggcgggcgtgtcgccacggtggccattgatcgcatggcgttcctggtaccggtggccgtcggcgcgcagttgtccttctatacccaggctctggaaatcggccgcagctcgatccagatgatggtcgaagtgtggagcgacgacccgctgtccagcgaatggcgcaaggtgaccgaggcggtatttgtattcgtcgccatcgacggcagcggccgcacgcgctcggttccatcgcgcgcacgttaaacctcgccgggttttgacggtcaattgccccactgcctgctattgagagtgctttgttatgccgacgccccacgttgaaaccgtgaaaatcgacgagctggactgctggcgcatccgccacaacggcgcggaactgatggtggcccaacagggcgcgcatatattcagttaccagcgcgacggcgagcagccgctgatctggccgaaccctgaagcggtgttcaagcagggcaagggcattcgcaccggcgtaccggtgtgctggccgtggtttggcgtgttcgaccgcaacccgcagagcgtcaaggcgatgcgccagagcgaccagccggccggcgcccacggttttgtgcgtacggcactctgggaattggctgcgacggaactcgaaggccatgcgctacgggtggatttgctactgccggtgccgacgggcggttttccgggctggccgcaccaggtcgacctgaaactgagcctgctgctggacgatcagttgcatatccgcctgaccagtcataaccgtggcgctgacaccgtaaccctcagccaggcgctgcacacctactttgcggtgagcgatgtgcgcaatgtagaggtcgatgggctggacggcgtgacgtatatcgataccgcggacggctgggccgagaaggtgcaatccggccagctgcgcttcactgccgagaccgatcgcatctacctcgatacgccgtcccagttgaacatcgtcgacacagactggcagcgccgcatccagctcactgccgagggctcaaagtcgacggtgatctggaacccctggaccgaacgtgccaaggcgtttgatgacatggccgatgatggctggccgggcatgctgtgcatcgagacggcgaatgtgctggacgatgtggtgagcctggcgcccggcgaaagccacaccttgggtgtgaggatcagcgctgtcgccctgtaagaacgccaatcaaaatgtgggagggggcttgcccccgatagcagtggatcagtcagcacaacggctactggtagaccgctatcgggggcaagccccctcccacattggttatatgttgccctttaaagatcggattccttgaccacccgcactttccccgcatccagcgcataggccgcatcggcaagatcgttattgaccttctccaccttcaacgtgcccgtgacccacagcggcgtgtagatatcatccagcttcagccccttgggatagcgcaccaacaccagttggttcggcggcggaggcggcacgtggatgcacgcgcctgggtacggcaccaggaaaaacaacgtgctgcggcctttggtatcagtttccaacggcaccggatagccgccgatgcggatgtccttgccattcatggccgccacggtcttggttgagtacatcaccgccggcaagcccttgctctgcttcaggccacccttgtcggtgaatgtgccttgggcttcgggggagttgtggtcgatctcgggcatggcttcgagggctttttgatccgacagcggcatcaggtcgagccagtcggtttccggcagttcgccagcgtgcgccaggccagagcccagcaggaggagtgttaacaaaagacggcgcatggagaggctcgacaagtacaggtggcgagcattctagctccctgcgcctgcgcagcgcagagagcttcgtcgcttagatcatttctttttcagcaggccgtagatcaccagcagcacgatggcgccgatcagcgcgccgaggaagccggcgccctggcctgcctggtagatgcccagggcctggccaccgtaagtggcgaccaacgaacctgcgatgcccagcaggatggtcatgatccagcccatgctgtcgtcgcctggtttcaggaaacgcgcgagcaggccgacgatcaagccgataaagatggttccgatgatacccatggcatttccctctgaatgtaggtgagctatgccaaagcctagtcaggctttggcatcctgcaatcagagagacgacggtcaccaatggttcccgtcggacttgccttattgctcggcgatcagcgcttcaaccttgaggatctgcgcttgcagcgtcgcgcggtccttgcagcgcaggttggcatggccgaccttgcgcccggccttgaaggccttgccgtagtgatgcaggtggcagtcgtcgacggcgatgactttttccacgggtggcaccacaccgatgaaattgagcatggcgctctcgccgaccttggccgtggagcccaacggcaagcctgccaccgcccgcaggtggttttcgaactggctgcactcggcaccttcggtggtccagtgcccggagttgtgcacgcgcggggcgatttcgttggccttgaggccaccgtcgacttcgaagaactcgaacgccatcacgccaacgtaatccagttgcttgagcacacggctggaatagtcttcggccagggcctgcaacgggtggtcggtactggccacggacagcttgaggatgccgctgtcgtgggtgttgtgcaccaacgggtagaagcgggtttcgccatcacgggcacgcacggcgatcagcgagacttcaccggtgaacggtacgaaaccttccagcaggcaggcgacgctgcccagctcggcaaaggtgccgaccacatcggcagcggtgcgcaggactttctggcccttgccgtcataacccagggtacgggttttcagcacagccggcaggccaatgctggcgacggcggcatccaggtccgcctgggactggatatcggcgaaggccggggtcggaatgcccaggtccttgaacatgctcttctcgaaccagcggtcgcgggcgatgcgcagggcttcggcgctcgggtacaccgggacgaactgcgacaggaacgcgacggtttcggccgggacgctttcgaattcgaaggtcaccaggtcgacttcgtcggccagttggcgcaggtggtccgggtcgctgtagtcagcgcgcaggtgctcacccaaggccgccgcgcaggcgtccggcgccgggtccaggaaagcgaagtccatccccagcggggttcccgccaaggccagcatgcggcccagttggccgccaccgattacaccgattttcatcgtcaaccacctcaggcgatgcgtgggtctggattgtccagcacgctgtctgtctgttcagcacggaattttttcagcaccgcgtggaactgcgggtgcttggcgcccaggatgctggcggacagcagggcggcgttgatcgcgccggccttgccgatcgccagggtcgccaccgggatgccggccggcatttgcacgatggacaacagcgaatccacgcccgagagcatcgccgactgcaccggtacaccgagcaccggcaggtgggtcttggccgcacacatgccgggcaggtgcgctgcaccgcccgcaccggcgatgatcacctcgatgccacgggattctgcttcatcggcatactggaacagcaaatccggagtgcggtgggcggagaccactttcacttcgtagggaatgccgagtttttccagcatatcggcggtgtggctaagggtggaccaatcggacttggagcccatgatcacgccaaccaatgcactcatcgtcgtgcctcttctctctgggcgcccgcaggcgcgtcaaaaaacaacaagccacgcgggaaatccggcgtggcttggtgtacgaattaaggccggttggaccggccgaaggccgcgcagtataccgtaataatccagataaacagcccctgggatgaccatctgtcttaagcgccaaagcggcagatttactgacttgcaggtcaacccggcggactttcaagaacatggaaacttcaccccgccaacatcgaatgccactaccgcatttgcctatgacaccgacaggcaatggcaggacccagccttatcgtgggcagcgacacaccccactgacttccccaaggacaaggactgccccatgcctgcatcggtcgagtattaccgcaccctacccgcgccccacgacatcctcaacctgacaccgcccgaaacggccacattgctgaggtcgctgaacaaaaacgtcacttacacccttggtcatatgccaacccgtccagtcagtgcgcttaagctgctgacccaggtactcacgcactccctgcccacgcccgaactggactgcatcttcttcgcctgcccgccatcggacgctaccccgcaacaaaccttgtacgagctctaccacaacctcgttctgttcaacgcgctgccctcgacctacgacgccagtacggcagtgttctacacccccggagcagacgccttgcaagccctgccgtccgactgccagacgcgattaaagatagccctgcagaacctccagggtatcgagttctacctgagtgacctcgccgacttctggcaagcccggcacgcctacgccgacatgaccaaccaggcgtacgtggcccgagccttcgcggcccagcttcagtgtgcggcatcgctcaggctggcagatggttcgctggaccatgaaagtgtcgcgttgatcacgcttctggcgtcgcctgggcatatttccggttgccatctctaccgcatcgcgtttcaggatgaagaacaacaggcgcacatccctctgtacggcgccttcctgatgacccgcactcccgccagcgcagtactcggtcaaaacccctgtgtcctttacgtgcccgggctcaagttgcaggcgttctactcgccggccctgctcagggcccacctgattgccgagttgagcgagaccagcctccaccgtctgctgccgtgtatcgaccgcaatcaactccagcgcttggaagagctggccaggcacgggctgcgggacgatcacgtcagcctgtcaccgatggtgttcagcccgcacttctatgaggacgtgaccctggcgctgatcaaccagcaacgccgagacatccggcacgcgtgggcatgggcgcagcctcggcatttccaggaggccaattggatcaaccgtcacatcgaggccgcctcggacctcaggtcattgatgacccttgaaagcaccttcaaagaccacacgacacccgccatcgcggcgtttgaacgaaaactgccgccccgcccagcgcccattcctgaacctgccgcgccgaagccgatcaacctgaacgtctacatccatcgtgatttgcacggcgatagccggctgtcgtccctgcgcgaagattatttttcctggctgcaaaccgagctggaagacctgtccggccggacagtcatgatcaccttccatcaggaaaccgggccagttgctttaatcgatttcaattacaaaggggacgaacaaaagagaagctctgcctggaaaaaaacggtgctccagtacctgcaaaacctttcgaccacccattcaccgcttgacctgtacctactgctgacaggtgacaacatcaacagtagagtcgccggcattgctaatgtgcgtggaagcttcggcattgccgcgacaacgtcataccgcatcgcagcccatgaagtcgggcatatgctcggcgcgctgcataaagacggcgacaatattttcaatggctggtggcacgaaaccctgatgaagaatcgtgactttttctcgttcctgaggggcaacgcctaccggttcagcgacaagaaccgggacaatatccgcacctacctgagccagttcgattgacgcacggctatacggcggggctcgccgccccgccttcgagcttgcgccacagcaaccgcacgttcgccttgcgtaccaaggcacagcggtacaggcggatttccagcggcacatgccattgcggcccgccgcacaccaccagctcaccccgcgccagctcggcgcgcacgctcaactgcggcacccaggcgatgcccaggccttccagggccatgctcttgaggctgtcggccatggcggtttcgtacacggtggtaaagcgcagcgcacgctgacgcaacagcaaattcaccgaacgaccgagaaacgcgccggcgctgtaggccagcaatggcacgctgccctcgccttccaggtcgaacagcggtttgccgtcggcatcggcggcacacaccgggagcatttcggtattgcccaggtgcagcgacgggaagatttccgagtccatctgcatcgcggcgtcggggtcgtagaacgccagcatcaggtcgcagccgccctcacgcaaagcatgcacggcgtcaccgacgttggtggccaccagccgggtggcgatgttcaggccttcgttgcgcagttgcgcgatccagcgcggaaagaagcccagggccagggagtgcgccgccgccacttgcatgacctcgccctgcccgccttccaggtgatgcaaatggcgcagcacttcaccgagctgctcgaccacggtgcgcgcggtgaccaggaacaactggcccgccgccgtcagctccaccggcgtgcgcgagcggttgaccagggtcaggcccaacgcggcttccaggctgcggatgcgtcggctgaacgccggctgggtcacgaagcgccgctccgccgcctgggaaaaactgcgggtcgccgccagggcgctgaagtcttccagccatttgctctcaaggttcattgctgcctcccgtgggtacgcaccattttggcacacacgcccgccatgataaccgggtcacactcacattatgccgtttgtgcataggccagtgcttaacagcattggcccaaaaagttctacaagcctagcattcgcagcgttccggccagttccgggtccatatcgagatgatttccgtcatgtcctccgctgcatctttccgtaccgaaaaagacctgcttggcgtactcgaagtaccggctcaagcgtattacggcatccagaccctgcgagcggtgaacaacttccgcctctcgggcgttccgatttcgcattacccgaaattggtggtcggtctggcaatggtcaagcaagcggcggctgacgccaaccgcgagttgggccagctcagcgaagccaagcacgctgccatcagcgaagcctgtgcccgtctgatccgcggcgatttccacgaagagttcgtggtggacatgattcaaggcggcgctggcacttcaaccaacatgaatgccaacgaagtcatcgccaacatcgcgttggaggccatgggccacaacaagggcgagtaccaatacctgcacccgaacaacgacgtgaacatggcgcagtcgaccaacgacgcctacccgaccgcgatccgcctgggtctgctgctgggccatgacgcgctgctggccagcctcgacagcctgatccaggcgttcgccgccaaaggcgtcgaattcagccatgtgctgaaaatgggccgcacccaattgcaagacgccgtgccgatgaccctcggccaggaattccgcgccttcgccaccaccctgggggaagacctggcgcgcctgaaaactctggcgcctgagttgctgaccgaagtgaacctgggcggcaccgccatcggtaccggcatcaacgccgacccgcgctaccaggccctggccgtacagcgcctggcggtgatcagcggccagccggtcgtgccggctgccgacctgatcgaagccacctccgacatgggcgccttcgtgctgttctccggcatgctcaagcgcaccgcggtgaagctgtcgaagatctgcaacgacctgcgcctgctgtccagcggcccacgcaccggcatcaacgagatcaacctgccggcacgccagccaggcagctcgatcatgcccggcaaggtcaacccggtcatcccggaagccgtgaaccaagtggcgttccaggttatcggtaacgacctggccctgaccatggcggccgaaggcggccagttgcaactgaacgtgatggagccgctgatcgcgttcaagatcttcgactcgatccgcctgctgcaacgcgccatggacatgctgcgcgagcactgcatcgtcggcatcaccgccaacgaagcccgctgccgcgaactggtggagcactccatcggcctggtcaccgcgctgaacccgtacatcggctatgaaaacgccacccgcatcgcccgtatcgccctcgaaagcgggcgtggcgtgctggagttggtgcgcgaagaaggcttgctcgacgacgccatgctcgacgacatcctgcgccccgaaaacatgattgccccacgcttggtcccgctgaaggcctaagcgtttgttgcaccgctcaccaggttgagggactagacacctctcaccttttgagggcctgaaggctcgttcttcaggcccttttttttgccccgaggttgtgaaatgaagcctataaaaacgccaatatcgctctgtaagtccaccacccagctgaaacctttaatcgccccgagcagacggatcacgttcgcctaggtatagtgccgcccctcttcgcgtcagagatcgtcggtaacgaggtcctggacagcgcgaaaccgcatgaataacaacacccgcaaaaggattggggtcgaagcgtcgtgcactgcctggtgctgagcgatagcgtcgaaccgtcctgcgtttgccattagaaaaatcagcgaggaacactccatgctcgaagtcatcaacgacttcctctcagggaaagtactgatcgtgctcattgtcgggctcggcggttatttcacgattcgctcgcgtttcgtacaactgcgtcacttcttccacatgttttcggtatttcgcgacagcctgaaaaacagctccgatcagctcagctccttccaggcgctgatgctcagcctggccggccgcgtgggtgccggcaacattgccggtgtcggtattgccgtgacactgggtggcccgggcgccgtgttctggatgtgggtcaccgcgctggtgggcatgtcgtcgagcttcatcgagtgctccctcggccagttgtacaagcgcactgacgccgagggcaccttccgtggcggcccggcctattacatccagcacggtttgcacaagcgctggctgggcatggtcatggcgttcctgttgctggtgaccttcggtttcgctttcaacggcctgcaagcccacgccgtgacccactcgctgaacaacgccttcggcctggacaccacctacaccggcctggccctggcggtactgctgggcctggtgttcatcggcgggatcaagcgcatcgcctcgattgccgacctgctggtgccggtcaagaccctggtctacatcgccgtaaccctctatgtgatcgtgctgcaattcgaccatgtgccggccatgctcgcgaccatcgtcaagagcgccttcggcctcgaccaggccttcggtggcctggtgggcagcgcgatcatcatgggtgtgaagcgcggcgtgttcgccaacgaagccggcctgggcagtgcgcctaacgtggcagcagtagcctcggttgagcacccgatcgcccagggcgtggtccaggcgttcagcgtgttcctcgataccttcgtgatctgcacctgtactgcattgctgatcctgctctccggcttctacaccccgggctttgaaggcgacggcattgccctgacccagaactccctggcggcggtggtcggcgactggggccgcatgttcatctcggtggccctggcgttgttcgtgttcacctcgatcatgtacaactactacctgggcgagagcaatctgcgcttcctggtaggcaacaaccgcaaggtgctgatgggctaccgcgccctggtgctggtgctgatcttctggggttccatcgagaacctgagcaccgtgttcgcctttgccgacatcaccatgaccctgctggcgttcgtcaacctgttcgccctggcgttcctgttcaagatcgccatgcgcatcctcaacgactacgacaaccagcgcgcagcgggcatcaagaccccggtgttcgactccagccagttccctgacctggacctggaccgcaaggcctggccggccaacccggtcaagcctgagccaggcactcaagcaagcgctgaactgaacgctcaagcgcaacgctgagcgtagatagatgacacgccgcccggccttgggcatgctctgggcccggcggcgtttttcgttcaggagaaaattcgatgtccccagctaataacgtgatggtgctctacaccggtggcaccatcggcatgcaggccagtgccaacggcctggcgcctgcgtccggttttgaagcacgcatgcgcgaacagcttgccgacgtgcaagtgcccacctggtgctttcgggaaatgtcgccgctgatcgacagcgccaatatgacccccgcctactggcagcgcctgcacgccgccgtggtcgaagccgtggacaacggctgcgacgccgtactgatcctacacggcactgacacgctggcctacagcgccgccgccatgagcttccaactgctcggcctgccggcgccggtggtgttcactggctccatgctgcccgccggtgtgcccgacagcgatgcccgggagaacgtcagcggtgccttggcggcactcggcgaaggcctggcgccaggtgtgcagttgttcttccacggcgcactgatggcgccgacccgctgcgcgaaagtccgcagctttggccgccatccgtttgctgccctgcagcgcaatggcggcgtcgcccaggccgaaatgatcccggccgccctgcattaccgccagcccaaagccgtggccaacgtgggtgtgctgccactggtgccgggcatcgccgccgggcaactggatgcactgatcgacagcggtatccaggcgctggtgctggaatgcttcggcagcggcaccgggccgagcgacaacccggcgttcctggccagcctccaacgagcacaggatcaaggcgtggtggtggtggcgatcacccaatgccatgaaggcggcgtggaactggatgtgtatgaagcgggcagccgcttgcgcggcgtcggcgtgttgtccggtggcggcatgacccgcgaagcggtgttcggcaagctcaatgcactgctcggtgccggactcgacaccgctgaggttcgccgcctggtggaactcgacctgtgtggcgagctgagctgatcggcctgtaacttgcttcccttccagccatcccctggctggaagcaccccatgctgcactcccacctgaccaccctcaacgccgtatccctggtgctcaacgccttcaaggccgaaggcttgccggcccaggaactgctggccggcagcggcatctgtgcggcggacttgagccgcgccgacacgcgcatcaccaccaaccaggagatgcgcgtgtgcgccaatgccgtggcgcggcgccgggatatcggccttgaactgggccggcagatgcatgtatcggcctatggcatgctcggctatgccctgctcaccagtgccacctttggtgacgccttgcgcctggcgttgcactacccggcgctgttgggaacacttttcgagttgagcctggaggaagacggccagcgcgtgtggttcaccgccggtgattatcgagaagacccggcgcttgagcgattcaatgtcgaactgtgcctggcctcgctgaaagtcatctgcgacgacctgctgggccagccactgccactgctcggcgcacgcttcgagcacgccgccccggactaccgcgcgcgttataccgaacgcttcccttgcccgttgcagttccaggccaccgccaacgcgtttgccttcgaccggcactggctcgaacaaccgctgccgctggcagacaccgtcacccaccaggccatggctgagcgctgccgcaaacagaacctggagttcaccgggcgccaggcctggctgggcaggattcgccagttgctcactgcgcaactcaacgccgcgccgggcctggaaggcctggccatgcagatgaactgctcggcgcgcaccctgcgccggcatttgcacgacctgggttgcagctaccaggagctgttggacgaggtgcgtttcgagcgcgccaagcaactgctggctgaggaccagtggccgatctaccggattgccgaagcgttggggttcagcgaaacggccagtttccggcatgcatttgtacgctggagcggcgtggcgccgagccaatttcgagcatgatgcgccattgaggggcgaattacggacaaacaatttggccatattcatccccttttggccgctcctgccgttctcttaaaccgcgcccaccgcaagactgcaggcaccgacccagcctgcggagaacaagaatgctgacgatctattcggacgatcaccacctgcaccacggccgctgcgaactgatggacgggcaactgatgccctgcttcgaaatgccctcgcgggccgaccatgtgctgcaacgggtcaaagaccgcgaactgggcccggtgcaggcgccacaggactttggcctggcgccgttgcaacgcatccacagccgcgattacctggacttcttcaaaggcgcctgggcgcgctggaccaaacacggccaggacggcgacctgctgccctacacctggcccgcgcgcaccctgcgccgggtgctgcccaccagcctgcacggccagttgggctactacagcttcgatggcggtgcaccgatcactgccggaacctggcaggcagcctactcggcagcacaagtggcgctcaccgcacagcaggcgatccagcacggcgcccacagtgtgttcgcgttgtgtcgcccgccggggcatcacgccgccagcgacttgatgggcggttattgctacctgaacaacgcggcgatcgccgcccaggcgtttctcgaccagggccaccgcaaggtcgcgatcctcgatgtggactaccaccacggcaacggcacccagtcgattttctacgaccgcagcgatgtgctgtttacctcgatccacgggcatccggaggccgagtttccgttcttcctgggctatgccgatgagaggggcgaaggcgccggggaaggcttcaacttcaactacccgctgcccgccggctccggctgggacacctggagcgcggcactggagcaggcctgccgggagatcgaacactacggcgccgacatcatcgtggtctcactgggcgtggacaccttcaaggatgacccgatctcacagttcaagctcgacagcccggactacctgaccatgggcgcgcgcatcgcacgcctgggcaagccgacgctgttcgtgatggaaggtggttacgcggtggaagaaatcggcatcaatgccgtcaacgtgctcgaaggttttgagaggtcagcccaatgaacatgctcaagtcgcttgtgctctgcgccgccgtgctgagcagcgccgcgtacgccgaagaaaaaaccctgaaggtgtataactggttcgactacatcacgcccaaggcgctggaggacttcaaggcgcagaacccggcgatcaaactggtctacgacatcttcgacaccaacgaagcactggaggccaagctgctgaccggtaactccggctatgacgtggtggtgccgtccaacgtattcctcgccaagcaaatcgaggccggcgtgttccagcccctggaccgcaaccaattgcccaactggaaccacctcgatcccaagctgatgaagctgatcgaggccaatgaccccggcaataaattcgccgtgccctacatgtacggcaccatcctgatcggcttcaacccggccaaggtcaaggccgcgctcggcgacaacgccccggtggacagctgggacctgatcttcaaggaagagaacatcagcaagctcaagcaatgcggcgtggccctgctggactcgccttcggagatcctgccgctggccctgcagcacctgggcctggaccccaacagcagcaaccccaaggactacgtcaaggccgaggcgctgttgatgaagatccgcccgtacatcacctatttccattcgtccaagtacatggccgatatcgccaacggtgacatctgcgtggccgtcggttattcgggcagtttttcccaggcggccaaccgggccaaggaggccaagaacggcgtagtcgtcgacatgcgcctgcccaaggaaggcgcgccgatctggttcgacatgctcgccattcccaaaggcgcgcagaacccgcaggacgcctacacctttatcaactacctgctgcaaccccaggtgatcgcgccgatcagcgattttgtcggttaccccaacccgaacaaggacgccaccgggcaggtcgacccggcgatccgcaacaaccccaacctgtaccccaccgaagcagcgatggcgaccctctataccctcaaacccctgggccgtgatgccgagcgcgccaggacccgcgcctggaccaagatcaagtccggcacctgacgggcctacataaacaccgcctgcctgactgcgcgctttctagcatggctacacccggggcctggcctcgggttttgtccatcccacgcatgtcaggctcccctatgacttcaacccaaaaagcctctgccacgcagcagccgccgcgctactactccaccgccaccttgatcactcaactgtccaccggcccggcgtttcgggaagtggccgccgtattgctgcgacgtgaactcaaggcgcattacccgaacctggatatagacccgaacatcaccctggtggaattggccgatcgcgaatcggtgtccaacgccgacgcacgctgggccaccttcaagcacaccggttggttgatcttcaacgcggccttgccattccttggttcgacggtgggggggcgcggcgtggatctggcaaatcatggatcaactgcaagaagtcgtggaggccgaaggcgacccgcaacaccgctcacgctggagcgccatcgccgatctgctgctcaacctgggcatggcgatcacgttgcaccgcgtgaccctgcgcccgttggagtcagagcctcccaccctcgccaagctacccaaaccggtcgagcccaagccggtagaacggattgacttctacctcagcgagatcggcctggagccggcgagccggctgtttttcgagaagaaaaagacctgattccgccgttacttatctaccgtcccagccactcctgctgtcgctaccgtgcgcgttcgctgttcgccctggccaacgacagaaggagccgccaatgtccaaaaacgcgcacaacaacaataaccacaccctgaacgggcgccccaccaacgcctacgaattactcacccaattgaccaccggcccgtctgcccgggaagtggcgtcctacacccttcgctgggtactgaaggagcagtaccccacgctcaatatcgacccggacctgacgatgatcgtcactccgcgctggcatgttcttgagtcggtcatcatgccggttccgccccacgtcgaatccatcacgacggtgttggcacgccagatgctgtcgcccacccctgtgttctaccttgagggcgagcacttcctcacgctgcatcctgagtcccccacagccgtgcacttgccggtgaaaatcgatgccatcgcacgcctgatcaatgagttggccggcctgctgttcgccgccttccaggagcgccaactggactactggaatgcatcgaacggcaacagttggccgcgttggcagaccttctcccattcattgcgcaagtcctggaatgtcaccaccgttgaagactgggatgtgcttgagtgtgaaatggccagagggctttatcggtttccattgcgcgcccaacgcagggtcaaggatcgctacaacagccgcgcctacgtggtggatgtcagcctgctgcgcgacgacgtcaccgtgcatgtgggggtgctggatatggcggtgctgatgggtgagttcaacgaacagacgatgatcctggcgtactcactggtcagtggctacgagcgcttcggatctctcgaagagctgggcaaggcactgccggccaaggtcgtgcaactgcaatcggatacaacattgcagtggaagttgtacgagcccgccgacagctttttcgacagcctcgcctgtgccctgatagccatgcaaatccaagccatcggtgaggccgagaggttcgttgccgcttccaccgcaccgcagcctgagatgccaaccactctctcccggattgtgcccagcattgaagacctgagcgaccatgcgctctcccatatccgccagatacatcaacaaatgccggactggctggccaatgcttcggaccaggacatcgccctctacagccgctacatcattgaattggcacagatccacgcgttcaacgaaggccgttcttttcaggacggaatcccgccaatacgcgactacgcccttgagaagctgcaggagcagatccgcgctcacaaagaaggtgcacacctgaacctgaacaaggttgcagtgacgatccagagcccagtgatctggggcaccttcgcaataccgggcgaggtggatgtgacccagcgcagcctgatcgacctggtcctagagaacctcaccggcctgcccaccggccaacccacggtgtactacaacggttcagtggcgccgcaatggttgaacttcaggttcctgaaggaggtgatcggcacagtcgatatcggcgaacactacccggcgctgatcaagagcacgttgctcgacgacccggtccagtcaagggccaggcaattgctgtacatcagtcatttacgcgtgcaactgccactgttggctctgcaattgaagatccagcaacgccagggcatggacgaactcggctaccgctatgtcgccgcagtgatgcaggtagagaagcaagaccagcaggttgacgggcagccgatcgtgatccgaccgcttgcctttgtcccgacattgcgcagcggcattcagggggatgaagtcgccaatatgtttgtgatcggcccgctggacccttccgccggcccctgcgtgctgtaccgccccttgctcgaaccagtgcttgcccagttcccatcccggcaaaacctgctgtacatgatcaagcaggaccaagacctgcgcgaatcagtgctggcctggttacccgaagacgtccgcttcaactacgagcagtacgtgtttcccgacaccctgccgtcgccttggaccgttgtgcgagtgattgtcgagccggcgacggtggtggatatgagcggacctatcgaattgagcgacgacgtgttgggcgacggcgccctgatcacgctgttcaaggccaacgccaacgcgatggtcgagttggcgacccgtcaatcgatctccaatgagcagaagcgctgggcgacctttcgccagaccggctggcagatcttcaacgccgtgctgccgtttctggggcctaccgtgggggttgccgcgtggatgtggcaaatcatggaagacctggagcaggccgagcaggcggtggacaaatccgacaaatccgagggctggaacgcgctcgtcgacctgtggctcaacctcggcatggcattggccctgcacgtagggctgcgtcatccaacccgtgagcccgtgaccgaaccctccaaaccccggcttgaacccatccccgagaaaccgatcaagcccaaagacccgctaccgcagccccccgtggtcgccaaccagcaattgccggacctgccgggcaccgacctgaccccgttacaccaggaaaccctgcatatcagcggcgcactcagtcgcgcgccttcgagcctgggtacacggctggacacattcaaaaccgacaaacccgccacccttggcgagcagaacagaacacccggcgttcatctgcatctgtatccggacaaggacaagtggtacgccccggtcggcgagcgctggttcgaggtcaatctggacgacaacgacaacgtggtcatagccgaccccaacgaccccgcgcgcactggcccgttgctgatcagcaaccggtccggccaatggttcgtcgacgtacggctacgcctgcgcgggggaggctttcgcaatcggcggcgtgccgctcaggggcagaagccgcagcgcatcactgagctgaggaaaagcctcactgacttcgatgccaacgagagtcgtcgccaggcggagctttccgaatccctcgctgccatcggctccgaacctggcccctcgaccgcgcaaaggcgcgatgcctatatcggcgacgtcgaccggcggctggaggaatacgacgtgccaatccgccaactcacggcactgggcgttatcgacacggtgcccaactaccagatcgccatggtcgattatttgaacaaacagttgctgctcacccgctccgccgtcgaggagcgcctgcgcccctatcgagacaccttgctcgatacggtcggcttgctggacgaagcaacctccgagatcccccagagcaccaccgatctggcccaggaaatgtccacgctgaacctggaaatgatcagccgcctggagtacgtcgactcacgcttcaaggaactttcgaagctgggcagcgccggtgcgcaggtgatgcagacaacttccaaggcactgcccaacctcaacctgcacgacctgaaagccttgcaaataatggtgtcgcgcttcctgtgcatcaaaaacggcaacgcgccggaacagcagcaggcacgcacccagctgagcaccatcgtgggtatggccgacctcgctgtgcagagttacctcgataccctgcaaaacgatgccgacagccccttgtcggagcgtatcgaggtgctcgatagcctcgtcgaccaattcaccactgtcgaccagcgcctgcttgacctgcatgccgatgcacccgaacaggtgctcagggaaccgctcaacgacctgttacaactcgtcgacgaattcaaccaacgtgcgactcacgacttggcgcgactgttgcgcgaacgcaaggcattggagcccaagccaggcccctctcggcccgcaccggtggcacctcgcaaggtcatcaagacacgctttcacggcgttgtggtcggcgagccacgcgagtcggacccttccctggtagatgtcaaagcaccgctgaccggcaaggtgatagccaccttccatgaaaaatcgccggggcagtgggcgcagcgggtcgaggagcgtacccgcccgccagcctcgaagccgatcagcttggacaccagcctcaaagagggccaggcgcttctggatgcaatacccgccacaatcaaacgtcttgagggccattccaataaaccctggcgcctgccgacagacatcgaagggatgtttcacctggaggtgtcgccccttgagcgcgcgattgaaaacatcgaggaggccctcacccaacgcaatctgactgaaatcgaccaccccgccgcggcccaactcaagctcaagctcaatgcagccgtgcagcagctttacgaagagggcaaagccacgcgcatcaggatgatcaaggagcaggttcccgtcgcatctcgtattcagtggctgtatgaacagggcgaggtgatcgtcaggaaaaccctcacgcgccgacgcctcaaaagccgtagagacttcctggacgaatacggagtccacgatcgcaagacccaggccgtattgtggtatgcgcactttcattaccactcgatgcaggcaggtagcgaagacttcgtcgccgggcacttcaagaccgttgcgcaacaaaaactcgggggtgcctttcagaccacagggctctcagacaaagagcagattgccattgagcgcgcagccattggcaaaccattggccaagtcgatgtttttcaacacgcacccccacagcgaaacctgagggctcgctcactgccataccctgcgcaagcgctccagcgcctggacaatcgctggctccggtacggcggcgaaccccaataccaggccggcacgctggtccgcaggcgggctggattgcgccagccaataactgctcaggccattgatttcaacctcagcggcccgcgccagttcgagcaactgctgctcgcgggccaggctgtccacgcgcaccgtcagatgcaaccctgcggcgacactgggcaactcgccgacaccggccaacccgcttggccaacccgccagcaaggtattgcgccggctcaacgcggcacggcgcatgcggcggatatggcgctggaaatgcccagcggccatgaattcagccatcaccgcctgggtgctgacctcggagtggcgcatgtcgacggcacggcgccgggcgaacgcatccaccaggcccgccggcaacaccagatagcccaggcgcaacgcagggaaggcgaccttgccgaaagtaccgacatagagcacgcgcccactgcgatccagcgcggccaggggcgacaacggtgcgccgctgtagcggtactcgccgtcgtagtcgtcctcgatgatccaaccgcccgtacgctcggcccaggcgagcaactccaggcgccgcgccaggctcatcaccacccccatcgggtactggtgggagggtgtgacataggccacgcggcaatcgctcaaggtattgagcacctgacaatcaatgccttcgccatccaccggcacgccgtgcaatttcccgcccgccagggcgaacgcatgcccggccgcacgatagccggggttttccaccgccacgccatcaccgggctccaccagcaactgtgcacaaaggctgatggcctgctgcgcgccactggtgatcactatttgttcagccgtgcaatgcatgcctcgtgagctgcgcaagtaggcggcaatcagaccacgcaggcggccgtcgcccgcggggtcgccgtagcacagcagttccaggtccggattgcgccagaatgccccgttcagcttcgcccagacctcgaacggaaacagatcgaaggcgggtacacccacacgaaatgcccgtggcggccccgctggcggcagagacaggtggttggtttttatccgcgccaagcccgcgctgtggataacttcactgtcgaggtcttccggcaaatccgcccattttgtggataaggttggggataagcctgttgaaaaccctgtggatacttttgtggatagtttttttgcgctgggtaattgggccacataggtgccatcgccgacccggctttcaataaacccctccgcatacagctgatcgtaggcgcgcaccacgctgttacgggaaatcgataacgccgccgccaggtcacgggtggccggcaaacgcgtcccactgaccaatcgcccgtccagcacgcgctggcgcagggcgtcatacagctggcgcgtcaggccttgacggcgatccagctcaattccggcagggttgaacgacaggggcggcgagacaggcgacatattggacctatgaaatgggtgccagatggctctttcaacgagccattagcctgcctaggatgcaggcattcgccaaggaatatttccatgtacacacctcgcgcctttgccctcgacgatttgcccgaactgcagcaactgatccagcacacccgcctggcgcaactggtgacctttggcgagcatggcctgcaagccagccacctgcccttgctgctcaaccccgatgaaggcccgaacggcacactctacgggcacctggccaaagccaatgcgcagtggaaagacctgcagaacggcagcgaagcgctggtgatcttcgcgggtgccgaggcctacatcagcccggcgttctacccggccaaggccgagcacggcaaagtcgtgcctacctggaactacatcgccgtgcacgcctatggcaaagccgaggtgttcaacgatgccgagcgcttgctcgcggtggtcactgcgctgaccgatcgccatgaaggcggccgcgaccagccctggaaagtcagcgacgcgccggccgactatatcgacggcatgctcaaggccatcgtcggcttcgccctgccgatcgagcgcttgatcggcaaacgcaaactcagccagaaccgcagtgcggccgacatgacaggcgtgcgtgcgggcctggcaaccagcgccgatgtgcgcgaccagaccctcgcccgttttattccccaaggagccccagaatgagcccgatcgacatccgccaagtcaccgccgccgaccacgctgcctggttgccgctgtggcaggcgtatttgaagttctacgaaaccgaactgccggacgccgtcagccaaagcacctggcaacgcctgatcgacgccagcgagccgacccattcggccctggcctggcaggacggcaaggcggtgggcatggtcaatttcatctaccatcgctccaattggagcatcgagaattcctgctacctgcaggacttgctggtggacccggcccaacgcggcaccggcgtcggtcgcaagctgatcgagttcgtctacgccaccgccaaggccgatggctgcgccaaggtgcactggctgacccacgagaccaatgccaccgcgatccaactctacgaacgcatcgccgaacgccctgggttcatccaatttcgcaaaggtctttaaggagcgcagcatgactacttccctcgccgactggaaaggcgtcccggccccaaccgtcaaactgcttgaagggcgcttcatccgcctggaaaaactcgacccggcccgccatggcgacgaattgttccaggccctccagggccccggtgccgaccccaagctgtgggactacttgccgtacggccctttcccggaacgcagcgccttcaatgactggctgaacaaccacgcggcccacagcgacccgtacttcttctgcgtggtcgaccgccagaccggccaggtgcaaggcctcctcagcctgatgtccatcgtccccgcacagggccgtatcgaaatcggccacgtcaccttcggcgcaccgatgcagcgctcgccgaaaagcaccgaggcggtgtacctgttggccaaacacgcgttcgaccagggctaccgccgcctggagtggaagtgcaacaacgccaacgatcgctccaggtacgcggccgagcggttgggcttcagtttcgaaggggtgttccgccagcacatggtggtgaagggcaagaaccgcgataccgcgtggtactcgatcctcgattcggagtggccgaaggttggagcggggtttgagaagtggttgtcgcaagagaatcagcgcggggatgggcaggtgaaaacattggcgcagtgccgtgcctgaatcgccaacactgcgttgatcaatgtgggagccgggctcccacattgggtcttcagtgccagcgccgttacctagaggtttctgcgcaccttcactacccccatcttcaatccgaatggccggaacactgcattcagcgatttcagtgtctgattgccttcgccatgctcgatatgcaccaaggtacgcacggagattttgcacatcctggcaaactggctttgatgcaggccggtgacttcggtgcgcaagcggcgtaccgcttcggcgatttccagtgtgccttctgccaaggcatcctgaatgctttcaatcaacagggtgcgttcttccacggtcaagctcatttcagtccccattctttcaaccgctgcggcagatgtttcaacgcaatgccgggatggttcattgtcactgcaggcaggccgctggcattgagtatgtctggcagggctgaaagctgttgcgcggcctccctcaggtcttcgaacagctgctcgctgtcgacaagatcacccagcaaatgacatacaccccgccaatccacgtcgcccgcccgctccagctccctgggccatttggtcgtgcgcgtgatgccttcgtcgtccattaccatcggcgccaaatcgtagatgggtgcaagacgcagggcgttcgcttcgcgaatgatcgaggtattgcgaccatggttgtccgagttgccgaggattttgttcaacagatcgcgcttgagatactcagcgaccaaccccggtacttgattggactgaccagcctctcgccacaattcaaccaacaacgtcaccacctcacgatgcgccatggcgctgcctggcaccgtgacacccgccaatgagtagattgactccacggcatagcgttcgaccccctgcgcagtgacgcgccgatcaaaacggtgcatccacacactgggcttgctcgcttcctccagtgataaccccgactccgccacggtatcaatacccaaggcctgcaaggctttgtagtagtggaattcgctacgcaggatgtcctgatccgtctgtgtgcctttgttgcgtgcaaacttcacaaaccaatgctgcttgacctgctcgtcgtccagcaccgcatccgggaataacaaaccgtccaggttttctgtcagcagtaactttggcgcctccccgcccgcccccgtggctccgccgatagctgcgccttgctcataggcatactccaggaaacggttatcccgccggataacctcatgacgttcaaaccccatgggggttcgattgtccaaagcctcaaccgattctttgattcgcatatgtccaatgggggcaggcgtactgcgcatcagcagaaaaaggtctgcactgatgtcatctggtttatccccaccaatacgcgccatcagaaaacgtttagcggcacccgcaggtgcgatgtcatgtacaaaagcgggagcatgctgggctctatcaccctcccattgcagtgggaacgcggcactcaccgaagtggcgaagggtgtcgccagttcatcaaggtgttccaccagatagcgctggtcataaccaaaactgcaccgactttcgaaacccagttgcggcgtatcaaatgtcaggagcatggcgtcctgccactttccttcagcgtagatttgtagtgtcagacagaccatggctctcacctgcaatttaatgcattcaccagctgaaaaggtgaactgaaattgcaatatagtgcagatacggagctcacgcacccactatgaacgcaataaaatgcagattcaaaaaacatcgagcaaaggaagatgagtttttaatcgccccgtactagagacaactcccgcaaaccaggggtcgatggcctgacagttatcaccccaccatctcgctaaattcccggcctcattcatcagaggttgggatttcatgccttttacaccgcacagagttgcccttgtcattgcccttgctctcagcgccgccagccttcaaaccgcacaggcgcggggcgatatcgaatacacgccgtactggtatcaaccctacgatgcacttgatgacgcgtgggtctacgtgcccgaaaccaaagcggcgcccctcgacggttatctcacccgcaaggccacttcgcacaatggcttgcaagtggccaaggtgctggagcccgcgctgattcgtttgctgcagtccggggagctgactgccgagcagatcaaagccctggagaaattcggtgatgcgctggagaaacagcctggcggaatcggtgccagccttgagcaattggctggcagccagaacgccaacctcgcgggcgcaacgcaaaacaccacgcagcaactcggcaaccaattgatttcaaccctgcgcacactgcccgccgacgacgaaggacacttctgggttcaaggcctgggccacgacggccgcctcgataaacaaggcggcagcgccggcttgaaatacagcaccgaaggcctgctgttgggcgccgactgggcactggatcacgcctggcgcgtaggtgtactgggcgcaaaatccaccagccatttcgacactccacgcttcgcctccgagttggacagttggcacctgggcggttatgccgtacgccgggacggcccgctggccctgcgcctgggcgcgatatacagcgaccatgcggggcagaacaaacgcaacgtcaacctgctggattacaaggagcacctcaggggccaatacaacgcccagagccaaaccctgttttccgagctgggctatcaactgggcagcacggatctcagcgtggaacccttcgccggcctcggcttccagcgctaccaccgcgacagcttcaaggaaaccggtggcctgaccgcactgaacgtagatgcacaaacccagcagaacttgagcagcatcgtgggccttcgcctggcaacggtgtatcgattcgataaccaggtcagcctcacacctcatctcagcaccggctggaaacacctctacggcgaggtcgaaagccaggtgcgccagtcctaccgcgcattgccagggcgggttgacggcttcacggtccagggcacttcgctggatcgcaatagcctggatctgcaagccgggctggacctggccctgtcgacacaacacaccgtcggcctgacctacagcgcccaggccggtaccaacagccgtaaccacggcctgatggggcaatggaagatgagcttctgacccaccaaactccaggcaaaaaaaaggggggcacctgcccccccgaggattaaacggtcgtgtcgaaggctgtatcagccttcgatctcaatcaggatttcgccagggttgacccggtcgcccttggccacatgaacggcggtgaccttgccggcaatcgcggcctgtacttcggtttccatcttcatggcttcggtaatcagcacggcctggccggccttgaccacgtcgccttccttgaccagcacatcgacgatattgcccggcatcgctgtgctgacatggcccggcgcggtagcgtgcttgcggttgctgctgccgccgctgacgaactcattgagcggttcgaacaccacttcttccggcatgccgtcgatggacaggtagaagtgacgcttgccctcggccttcacgccaacaccggtgatgtccacgcggtagctttcaccgtgcacgtcgatgacgaactcggtcggcacgccttcgccaccggcacgcgccacaccgccggcttcagggatcggcagcagcacttccggcgccagggtgccggcgtcgcgttcttcgaggaacttgcgcccgatgtccgggaacatcgcgtaggtcagcacgtcttcttcggacttggccaacgcgccgatttcaccgcgcagcttggtcatttccggcttgagcaggtcggccgggcgcacgtcgatcacttcttcgctgccgatggcctggcgccgcagtttctcgttcaccgtgcccggcgccttgccgtagccgccttgcaggtagagcttcacttcgttggtgatggtcttgtaacgctcgccggccagcacgttgaagaacgcctgggtgccgacgatctgcgaggtcggggtgaccagcggcgggaagccaaggtcttcacgtacgcgcgggatctcggccaacacttcgctcatgcggttgagggcgccctgctctttcaactggttggccaggttggaaatcatcccgcccggcacctggttgacttgcacacgggtgtcgaccgcggtgaattcgctttcgaactggtggtacttcttgcgcacggcatagaagtacaggccgatctcttgcagcagctccaggctcaggccggtgtcgaactcgctgcctttaagggcggcgaccatcgactcggtccctgggtggctggtgccccaggcgaagctggagatggcggtgtcgatatggtcagcaccgttctcgatggccttgagttggcacatcgcggccaaacctgcagtgtcatgcgagtggataaagatcggcagactctgctcggccttcagcgccttgaccagctcgccggtggcatacggggtcaacaggccggccatgtccttgatcgcgatggagtcgcaacccatcgattccagctgcttggcctgcgccacgaaggcttcaacggtgtgcaccgggctggtggtgtaggcgatggtgccttgggcatgcttgccggcggctttcaccgcttcgatggccacgcgcaggttacgcacgtcgttcatggcgtcgaaaatgcggaagacatcgatgccattcacagccgccttggccacgaacgccttcaccacatcgtcactgtagtgacggtagcccagcaggttctggccgcgcagcagcatttgcaggcgcgtgttgggcaatgcggcgcgcagtttgcgcaggcgctcccacgggtcttccttgaggaagcgtacgcaggcgtcgaaggtcgcgccgccccagacttccagggaccagtagccgactttgtcgagcttgtcgcagatcggcagcatgtcgtcggtgcgcatgcgggtcgccagcaacgattggtgggcgtcgcgcaggatggtgtcggtgacaaagattttcttggacattgttgtattcctcacaggcctgcgtgggcggcgatggcggcggcgatggccagggccagctcttcgggtttgcgcttgatcgagtagttggtcagctcagggtggctttccacgaagctggtgttgaactggccgctgcggaattccgggttgcgcaggatttcctggtagtaggcggcagtggtcttcacgccttgcaggcgcatgtcatccagggcgcgcaggccgcggtccatggcttcttcccaggtcaacgcccacaccaccagtttcaggcacatagagtcgtagaacggcgggatggtgtagccggtgtagatcgccgtgtccgtacgcacgccgggaccgccgggtgcgtagtaacgggtgatcttgccgaagctgggcaggaagttgtttttcgggtcttcggcgttgatacggaactgcaacgcgaaaccacggtgctggatgtcttcctgcttcaccgacagtggcaggccggaggcgatgcggatctgttcgcggacgatgtcgatcccggtgatttcttcggtgatggtgtgttccacctgcacccgggtattcatctccatgaagtacacctcgccctcggcgagcaggaactccacggtaccggcgttctcgtagcccacggccttggcggcgcgcaccgacaggtcgccgatataggcacgctgttccggagtcagttgcgggcttggagcgatttcgatgagcttctggttgcgacgctggatcgagcaatcgcgctcgaacaggtgcaccacgttgccgaagctgtcaccgaggatctgcgcctcaatgtgcttgggattgacgatgcatttttccaggaacacttccgccgagccgaaggccttggtggcctcggaaatcacgcgggggaaggcttgttcgagttcttcgcggctgttgcaacgacggataccacgaccaccaccaccggacgtggccttgagcatcaccgggtaaccaatgcggtcgccctcggtgagtgcctcgtggatatccgcgacgttgccttcggtgcccggcgtgaccggcacaccggccttgatcatgctgcggcgcgcttcggtcttgtcgcccatgcggcgaatcacttcggccgatgggccaatgaatttgatgccgcgttcggcgcagatgtccgccagttcagcgttttccgacaggaagccatagccggggtgcagcgcatcgcagccggtttccaccgctaggttcaccagcttgcgcgggttcaggtaaccggccaggggctcggcaccgatgctgtgggcttcgtcggcacgcttgacgtgcaacgcgtggcggtcggcgtcggagtagaccgcgaccgagcgaatgcccatctcggcgcaggcacgcacgattcgtacggcaatttcaccacggttggcgatcaggatcttttttatcacttggaaattcccttgagccgattgctgcgttcttcgacccactggagccgggtcggcgcgtgaccaaatgtttcatgacagtcgcgagacacacactaagcccgccaagggattaacaaaaatcaataattattgggtcgggcataagtaaagacttatagttgtccgaacagccggtggcgagagaattagaaaatgcgtaagtcattgatgcgactgacattgcgtcaattgcagatcttccatgaggtgtgcgatttgcgctcctacagccgtgcggccgaggaaatgtccctcacgcaaccagccgtcagcctgcaaatccgtcaactggaagagctgatcggccagccgctgttcgattacgtgggcaaaaagctctacatgaccgaggctgccgaagccctgcagcgcgccagtcgcgacatcttcgggcgcctggaaaacctcgatatgcagctttcggacatgcagggttcgttgcagggccagctgaaactggcgattgaatccagcgccaagtacttcgtgccgcacctgttcgccgccttcaagcgtcagcatccggaagtgcagttgcaattgacggtggtgaaccgcgcccaggtgattcgccggctttcggacaaccgcgacgacctggtgatcatgtccatggtgccccaggacatgggcctggaattcctgcccttcctcaacaacccgattgtcgctgtggcgcctcccgaccatcccttgagcctgcaaggcccgctgcgcctgcaggacctggagccctacacgctgttgctgcgcgaaccaggttccggcacgcgactggcctgcgaggagtacttcaaggaaaaacgcgtgcacttcacccagacggtggaagtggcctcggccgaggcgcagcgtgagtgtgtctgtgcgggattgggcgtagccctgctgacgcgtcatgcggtcaacatggagttggccaccggcgggctcaaggagctgccggtggaagagctgccgctgtaccgcagttggtgcctggtgcaggccaaggccaagcgcctgtcaccggtggcccatgcgttcctgggctttatccgcagcgaacgagcgcagatcagcgtgctggctgagcgtttcgctgggcagccgcgggtgcctgccagtggagttccgggtagtcactgatgctctggagcaactggcgctcctcacaacggtcttcgattgcgcgacggaacgccatgcggcgttggtcttcctgctgacgacgggttttgacggagctgttgctgtcttcgtaagtccgggccatttggagtctcccaatgcgagtacggggagttcaggatggccttggggagttacggtttggcggcacacgcatgacaagacgatgaacattcctgatctgtaggaaatccaaatgtgggagggggcttgcccccgatagcagtgggtcagccaatgcatttggtgactgatacaccgtaatcgggggcaagccccctcccacattttgacctcaggtcaatcgtcgagggctttgacggatttcggtgacaggcgaaggctgcgcagactgcgcttcacgctcttgaggtggttgaccaggctcggcccacgcgccatggccacgcccatcgccagcacgtcgatcaccaccaggtgggcgatgcgcgaagtcagcggcgtgtagatttcggtgtcttcgtgcacgtcgatcgccaggttgaccgtagacagttccgccaacggcgtctggcttgggcacagggtgatcagcgatgcaccactttcacgcaccaggttggcggtgatcagcaggtctttggagcggcccgactgggaaatgcagatggccacgtccgtaggcttcaaggtcaccgccgacatggcttgcatgtgcgggtcgctgtaggccgcggcggtgagcagcaaacggaagaatttgtgctgggcatcagctgccaccgcgcccgaagcaccaaagccatagaactccacgcgctgagcctgggacatggccgtcacggccttttgcaactccaccgggtcgagcttctcgcgcacttccatgagggtgtgcaaggtggtgtcgaagattttcaggctgtagtcggcgacagagtcgtcttcatggatcgcaaattggccgaagctggcgccagcggccaggctttgcgccagcttgagtttcaagtcctggaacccggagcaaccaatagcgcggcagaagcgcacgatggtcggttcgctgatgcccacgctatgggccaggtcggccatggaactgtgcatcacagccgcagggtcaagcagcacgtgatcggcaaccttgagctccgatttgcgtaacaggtggcgcgactgggcgatatgttgcaacaggttcaaagggcaggactcttgttatgggcagggccagggatgtagcaagcttgtagttatactacaagaattgccgttttgcccgtccgacgcatcactaaatcgccctgcccccctttgaatctaagggcagccgcgttgtagccacaggggcgtccccagcgtcgttaaggaaattctgcatttttccgtaacaaatctgccaacccatcagcctgcatcggccgactgatcaaatagccctgcacttcgtcacaacgctcgccccgcaggaaatccagctgctgctgatcttccacaccctccgccaccaccttcagcgccagcccgtgggccatggcgatgattgcccgagtgatggccgcgtcttcgcgcccctgacccaggccgcggatgaaggtctggtcgatcttcacgtagtccacgggaatgcgcttgaggtagctgagggacgaataaccggtgccgaaatcgtcaatcgccagcttcacccccaggtctcgcagttgctggaaggtcgcgatgatgtgttcgacgctgtcgagcaattggctttcggtcagctccagctccaggtattgcgggtccaggccggtttcttcgagcacctggcgtaccaggctgaccaacttgccctggcgcagttggtgtaccgagaggttcaccgatacccggatcggcgccaacccctggcgctgccactcgcaggcttgccagcaggcctcgcgcagcacgaattcacccagcggcacgatcaggccggtctcttcggccaggccgatgaaatcccccggcggcaccatgccccactgcgggtgctcccaacggatcagcgcctcggccgcattcagcttgccgctggccaggcacagcttcggttggtagaacaccgtgagctgacgctcttcgatggccttgcgcaggtggttttccagctgcaagcgctccagggtgctggcttgcaggctgtcggtgtaaaactggaagttattgccgcccaagtgtttggcgtgctgcatggccatgttcgattggctgaccaacgcggaaatttcccgcgcgttgtccggcaacaggctgacgcccatggaggcactcaccaccaactcgtgcccctccaccgtcaccggcacccgcagtttggccagcagccgcgtagcgacccgcgccaggctcgacaggttgccgtaggcgtcgaacaacacagcaaactcatcccccgacagccgtgcaatggtgtcggcctcgggcaaggcgttgattaagcgtcgcgccattttctgcaacaactggtcggcgacttcatggcccaggctgtcgttgagcagtttgaagcggtccaggttgatgtgcagcaacgccaggctgcgcccaccctggcgtacgcgctggtgagcttcgcgcaaccgttcgcggaacagcgagcggttggccaggccggtcagttcgtcgtagtgagtgaggtagcgcatacgctcttcggactcacgccgtgctgaaagatcggcgaagaagcccacgatatggctgacttttcctcgaatatcacgcacgacattcaattgcagccactgcggatacagctcgccgtttttgcgtgtctccaccaattcgccctgccacgtgccgtggctgagcaacgcctggcggatcaccgggaaatggcggcgggcgtcacggctgctgggcagttccaccacgttgcggccaatcatgtcgtcggtttcaaaccccgtgacacggctgaaggcttggttgacggcaatcagcttgtagtccggatcaaggatcacaatgccttcgctggcggcttcaaatacggtcgaggccaaccgctgctgttcctccagggccttgccggcgctgatatcgcggcgcgtccccagcatgcgcgtgacccggccgctgggcgcacgctccacggcgcggccacggtcttcgatccacacccagtgcccgtcgccatggcgcacgcggtattccacctggtagtcctcgctgcggcccttgaggtgttccaccagggcacgcttgagcagcggcaggtcttcggggtgcaggcgcggcttgaggtggctgagcattgccgttacgtactccggctccaggccgaacagctccttgagctgggtgtgatggacctcgtcggtttgcaggttccagtcccacaggcccagttcactggcttgcagggccatggccaggcgcgcttcgcttttattcagggccaggctggcggcgtccagttcctggctgcgctgtgccacacggtcttgcaggccggtctgggcttcgcgcagttcctgttcgacttggcgacgctgctcgacttcgcgcaccagttcctgattgagttgctcgctgcgctgctgcgcctgttgcaggtgctcgatcagcgcctggttctggaagcggcgcaacaacccgcgctgaatcaggcgattgacctgccacgccaccaggctcaaggacgccagcaggatcaggccaagtacaccccagccgcgctgctgcgggtcgccactccagaacaggtagaggatggacggcaccaggcacggcaaggcaaaggacaggaacgccggcaggctcacggcgtatgccacgctggccgacaaggtcgccgcgccgatcaggccgaacacccaggcctgttgcatgaagctgtccaccggcaccagggcgatggcggcggtggccagcgtcaggccgctgaccgccgagccgagcaggaacatgcgttgccacaccggttgggcctggcggctgggcatcgccgagtcaaacgcggccacctgaatcacacgcatcgccaccagggccagcagccagaccaaccagacgctgtccaacaggtattgctgggggttccacagtagccaggcgcagaccaggccattgaccaacatcaacagggtcggcagcagcgagccttgatacagcaggcgtgtgcgctcgaccgccatctccgtggcgtagtgtttacggataacctgcgcgggagccgccgaggggccaagcaggtcggtgctaagggtcataggcagtgttcttataatggtgagcccgaaacgtcgacggagcatacacaagcaagcgcttgggccaaactgctccatgtcataaaaccgcacgctcatgccgcgcaaacttccgggccagacggcttgagtgagacgcggcgcgggctgtggccattgaccgaccggtcatcaccccgcaggtttgcctcgaccacccggcattgttatttgccccactcccccgggggccatagaatacgccgatgcgcgatgatctctcccttttgctgaactccctcaacgatgcccaacgccaggccgtagcggcccccgttggccgtcagttggtcctggccggtgctggctccggtaaaacccgagtgctggtgcaccgtatcgcctggttgatccaggtcgaaaacgcgtccccgcattccatcctgtcggtgaccttcaccaacaaggccgctgccgagatgcgccaccgcatcgaacagctgatgggcatcagcccggccggcatgtgggtaggcactttccacggcctggcgcaccgcttgctgcgggcgcattggcaggaagcgggcctggcccagaccttccagatcctcgacagcgatgaccagcaacgcctggtcaagcgggtgatccgcgagctgggcctcgacgaacaacgctggcccgcacgccaggcgcaatggtttatcaacggccagaaagacgaaggcctgcgcccgcaacatatccaggccagcggcgatctgttcctggccaccatgcgcagcatctatgaggcctacgaggccgcctgcgtgcgcgccggggtcatcgacttctccgaactgctgctgcgcgccctcgacctgtggcgcgataacccaggcttgctggcgcattaccagaaacgtttccgccacatcctggtggacgagttccaggacaccaacgccgtgcagtacgcctggctgcgcctgctggccaaaggtggcgacagcctgatggtggtgggcgacgacgaccagtcgatctacggctggcgtggcgcgaaaatcgagaacatctaccagtattccgaagacttcccggacgcggtcaccatccgcctggagcagaactatcgctccactgccgggatcctcaaggcggccaacgccttgattgccaacaacaccgggcgcctgggcaaagaactgtggaccgacggcggcgaaggcgaagcgatcaacctgtacgccgcgttcaacgaacacgatgaagcgcgctacgtggtggaaaccatcgaaagtgcgctgaaaaccggcctggcgcgcagcgacatcgcgatcctgtaccgctccaacgcccaatcgcgggtcctggaagaagccttgctgcgcgaacgtatcccgtaccgcatctatggcggccagcgcttcttcgagcgggccgagatcaagaacgccatggcttacctgcgcttgctggaaggccgtggcaacgatgcggcgctggaacgggtgatcaatatcccggcccgtggcatcggcgaaaaaaccgtcgaagccattcgtgaccacgcacgccacgccgatgtgtcgatgtgggaagccatgcgcctgctcatcgccaataaaggcctgaccggtcgtgcggcgggtgcgctgggtgtgtttgtcgagctgatcgagaacctggcggccaagtgcgcggaaatgcccctgcatttgatgacccagaccgtcatcgagcagtccgggctgatcgcctaccacgaagcggaaaaaggcgagaaaggccaggcccgggtagaaaaccttgaggaactggtcagcgccgcccgtgcgttcgaaaacaccgaggaagacgaagagctgaccccgctggccgcattcctcggccacgcgtcgctggaagccggtgatacccaggccgacgagcatgaagacagcgtccagctgatgaccttgcacagcgccaagggcctcgaattcccgtatgtgttcctggtgggcatggaagaaggcctgttcccgcacaagatgagcctggaagagcccggccgccttgaggaagaacgtcgcctggcctacgtgggcatcacccgggcgatgcagaacctggtgatgacctacgccgagacccgacgcctgtacggcagcgagacctacaacaaggtgtcgcgcttcgtacgtgaagtaccgaaggggctgatccaggaagtgcgcctgtccaacagcgtcagccgcccgttcggtggtggacagcagcagaactccagcagcatgttcgccggctccgagattccggaaacccagttcagccttggccaacaggtcaggcattcggtattcggcgaaggggtgatcctcaatttcgaaggcgcgggtgcccaggcgcgcgtgcaggtgaatttcgccgaaggcagcaagtggctgatgatgggttacgcgaagctcgaagccatttgaaacatttgcccacatgaaggtttttggcccgcccttgtttttaacgagcgcgggccaatatctgtaataagtcctacagaccactctgaatcggtcctacgcaaaagcccgaaacattatgccgctagccactgtcaccacacctgtgcaacatggcgcgcgtgcaatccacaaatgggaattccctttatgaaacgttttcttagcatcgccatggcgttgtgcatcggcctgacgatgagcctcgacgccaacgccaaacgcttcggtggcggcaaaagctcaggcgcagcaccgactcaccagactagccaaatggctccatccgccggtgccggcggtgctgcggccaccgcaggcgccgccggtgctgcaggcgctgcagccaaggccggcggtgcttcgcgctggttgggccctcttgccggcatcgccgccggtggcctgctcgcctccatgttcatgggcggcggcttccagggcatgcagatcttcgacatcctgatcatggcggtcatcgccttcctggtcttccgctttatcgccgcccgtcgccgcaagcagcaggagcacatggctccagccggcgcgccgatgcagcgtgaagtgttcgagcaaaaaccagccatgggctcgatcttcggtggttcgccagcgccagctgcggcccgtccggtgatcaacgcaccggcctggttcaacgaagaacgtttcgtcgaagcggcccgcagccacttccagtccctgcaacagcactgggacgccaacgaaatggacaagatcgccgagttcgtgaccccgcaactgctggagttcctcaagcgcgaacgcgccgagattggcgatgcattccagtcgacttacatcgacgacctgcgcgtgcaactggacggtgtggatgatcgcgccgacaagaccatcgccaccctgaccttcagcggtgtgtcgaagtcctcgcgtttcgaccagggcgaagtgttcagcgaaagctggaacatggaacgtgcccagggcgataaccagccatggctggtcgccggtatccgccagaacggctgatccctgcacgcttggtaaacagatacaaaaaaccccggacctgtccggggttttctatttcacggttgcacttatagcgagctactgtataaaacgcccctataaaccgcgccatctagcaagaggatcccggccgtggaagaaatcatcgaacaattgcgtgaagccaacgaaccggtcccggttcccttggagctgcctgacgaagaccaactggtggagatcgaggaacaactgttcatcgacatcccgtttgtcttccgtgaattcctgctgaccgtcagcgacgtggtgtacggcagcctcgagccggtgaccgtcaccgacccgcagtcccacacctacctgccggacgtggccgccaacgcctgggacgccggtgtcgaccgcagcctgatcccgatctgccaggacggcgacgactactactgcgtcgaagaagacggcaccgtggtgctgtggtccggcgaagaagaaatcgtcaccgaagaaacctgggaatcggtgtggcactgggcgcgagacgtctggctggaaagctgacagcgctctctggctaaagaggcttgctgtggcgagcgggcttgccccgcgtcgggctgcgaagcagcccccccaaaaaagtccctcaatgctccggcgtatccttatggttatccagcgtctccaacaaggcgacctgcatccgcgtatgcacgcggatgaaccatcgccagagcaccgccgccacagccgccgtgaccacggcgatcagcaccagcaacttgttggtcggcagaatactggccgacaaggctgccaatagcaggaagatcaccagcagcgagaggatcgggatcagctccgcgatcacccttcgcacacgctgggtatgccgcccggccatttccggcttcacgctcatctccgccagcagcatcgacagcgccttgagcttgcggtatgccgcaatcaagaacggcagcgacaacagcaacgccccgccccagatcaacgccttctgccagctcggatcgctgatccagccttccagatacccaccgatgcgcgccgcgaaaaagccgccggcaaagaagatcgcaatcaccagtgccaggttaacgcccacttgcaggatgatcttgcggatcatcgacgccagcatcgccccctcgccctggggttgaatgctgcgcagccattcgccatacatgccgaatactcggctcatacgctggggcatgaccgacgcgatcttcaacgacagcgggtcggcaccgcgaatcaggtacggcgtgagcagtgtggtgatggccgaaaccgctaccgccaccgggtagaggaaatcactggtcacctgcagcgtcatccccagcgccgcgatgatgaacgaaaactcgccaatctgtgacagccccatgcccacgcgcagtgaggtgcggccgtcattgccggcgataaacgcccccaggccgcaggacagcatcttgcccagcaccacggccacggtgatcaccgcaatcggccaggcgtattgcagtaggatctgcgggtcgatcatcaagccgatggcgacaaagaagatagcactgaacatgtcgcgaactggctcgatcaggcgctcgatcttaatcaactgccgagattcggccatgattgcgccgatcaggaacgcgcccagcaccatgctgtattccagtttgaccaccagcaggcagaaaccgaaacacaaccccagtacggtgatcagcaacatctcgttgctttcgaatttggccacgtaggccagcaaacgcggtaccagcaaaatgccgatgaccagcgcgacaatcatgaacagcgagagcttgccgactgtggagaacacttcgccggagctgaccgtaccgctgacggcaatgctcgacagcaaggcgatgatgccaatgccgaggatgtcctcgacgatcagcacgccaaaaatcagttgagcgaaacgctggttcttcatcttcaggtcattgagcgccttgacgatgatggtggtcgaggaaatcgccaggatcgcgccgaggaacagtgaatccatggtattccagtcgaaccagcggccgatttcgtagccgatccagatcatcaggatgatttccaggaaggccgcgataaacgcggtggcgccgaccttgaacagtttgcgcaggctgaattccaggcccaggcagaacatcaggaagatcacccccagctccgcgagggtcttgatagtgtcttcgtcgtggatcagaccgaacggcggggtgtgggggccgatgatgaacccggcgacgatgtagcccagcaccaccggctgcttgaggcggtgaaacaggatggtgacaacccctgccaccagcatgatcacggccaagtcctggataaagctgatggcgtgcatggcgaggggctccttgagggtactggcgcttttcccacttccgcgcgcgcctttgaaatgtcgcaaagtgcggaaggaaaagtctgccttgatcgtaagaaatgccctgagatgggcttttgaaggttaacaccgcgacttccgccggaaagccggtgcaatatatggaaacagatcggtgcgcgcgtgacggcaagccccccaccggcgtcccgttatggatggttctgcaaagattccagcacccgcagaggtgccccccaaccaatgcctacaacccgtgagtgtgctatggaacccggaaacgcccagctgtcgatgacggtattgatgacccctgacatggccaacttctcaggcaatgtccacggcggcaccctgctcaagtacctcgacgaagtggcctacgcctgcgcgagccgttatgccggccgctatgtggtcacgctgtcggtggaccaggtgatcttccgcgagccgatccatgtcggcgagctagtgaccttcctcgcgtccgtcaactacaccggcaacacctcgatggaggtgggcatcaaggtggtgaccgagaatatccgcgaacgctcggtgcgccataccaacagctgcttcttcaccatggtggccgtggacgaccagcgtaaaccggccgccgtgcccccgctgcaaccacagaacagcgaagacaagcgccggttcgtgcaggcccagcagcgccggcagatccgtcaggaactggaaaagcgctaccaggaaatcaaggcagacgcgctgtaggccctttccccgttgtaggagcgaacaaccgcgctcctacaatcgccagcactgatcatcgtgggcacagacatcaaagcgctggtccaactggctcatgcgctccatatgatggttcacgatgtccaccatcaccgctttgctggtgtttttgtagtactgcgccatcaacttgtcgttcgccttgacgcgctcgaccacggcggcgtccgtcgggttctgccattgctccaggatggcatcttcggtgccgctcaggcgcatgcggtaaacccgctcataaagcgccagggtacgcgccttgcggccggccatttcctgattcaccagtgcatagttctgacggtactgaacccaatagtcgtcaggtggcgtgaatgagccgaatcgcgccttgcgctcggcgattgactcttcgacggcttgcggacgctgcgcggtgtcaggctccatcaacgtgatgagttgcatatgggtttcaacgatcgcgttgatcaacgcggtacggtgtggcgtatccgggatcaccttgccgaatatcgggcttttgcccgcgcacgatggcatgccgttctcgaatatcggctgtggaatgcgtacatccttgccacccgagcgcgtcaggcgctgcaacgaggtcgtgcagatgccacgcgccatatcgaaggtcacttcgtactcttccccggcctttggcgtgatgctcattgatttgccgcagacatagctgccgccattggtgttgatcatcaacatggtttctttgccgggtgccagcttgaactccagcaagcctctggccgtggccggcgggggcaccgacatgccgacacgccgccgggtatcgaccaggaaaatattgttgagcatgccggtggtctggcccatgcaatgctgcgtatcgtagacgtcgatggtggtattggaggtattggagatgaagcgcagcttggcagcgtccggatcggtggcgtcagggtaagtaccgttcacactgcaaccggccagcaacgatgtcagcaccagggcggtcagtgcccgtggcgaagggaatacgggggacatggttcttccttgaaaagcacaggggactaagaggcgcccgatagtaccggacgccctttgcctggctcaatcaggaatattcctacaacccgataggcgtggcttcgaaacgcacgcgaggatgggcaatgcggtcctgggcgcgcaccagctccagttcgtaactggcgcaggcctgggtttccaacagcacttcatggaccgctgcggcggtgaattcgaaggcggcgagcaggctgtcgcccaacagaacacgcgccagaaacagccccgaggtcaaatcgccgacgcccaccggctgacgggggaacgccagcagcggccggcgcaaatgccagctaccatcggcggtcaccagtagcatctcgaaaccgtccggcaacttgcctggataatccaggtgtttgaccaatacggccttcggcccacgcgccagcaacgccttggccatggccaggcaatcgaacagcgattgcggcttgcgcccggcaaagctgtccaactccaactggttggggcacaggaagtcggccatggccgcggcttcgtccagcaggaaatcgctgacttcctggggcacgatgcagcccttttcaggatgccccatcaccgggtcgcacaggtacagggccttggggttgatggccttgatgcgcgcaacgccggtcagaatcgcccggccctgatcggcactgcccaggtagccggacagaatcgcatcgcaattgcccagctcgccgatggcggcaatgccttccaccaacgcgggaatctgctgtggcgccaacacttctcccgcccattggccatactgggtgtggttggagaactgcaccgtgttcagcggccacacgttcacccccacgcgctgcatggggaacacggcggcgctgtttccggcgtggccaaagaccacatgagactggatcgcaagcagatgaggtgtgcgtttcatgcgggagatttccgtaaaaccaatgaaattctggccgcgcagtatgcgactaaacgcagcctgtacgacagaccggcgacacagttaagctgctctcactttgttggagtttttcgcatgctgaccctgggaaacatgttcgtgttgatgctgctggcgaccggtgccgcctgggtatggcacaaccacggcctgcgcgagcgggcgctggagcgggtcaagcagcattgcgccaagctcgacatcgaactgctcgacggtgcggtggcactcaagcgcatcggctttgtaaaggatgccaacggtcggcgacgcctggcgcgcatctacaacttcgagttcaccgtgaccggcgaaacccgccacccggggactatcacccagttcggtgcccacagcgcacagatcgaactggcgccctacccgttcgagatcaagacgccgctgcccagcgccgaagtgattgagctgagccagtggcgccaggaccatgcgtccaagaaccgtcactgacgactggcggccagcgcacgctgtaacacatccacgtcctgtggctcgctgaagatcaattcgatacgcgaatcgcggcgccattcgctgggttgccagctgagcgggccgttatccacagcgttggcggacacccagccttcggcactgtggataaccagcttggcgcggcgccaatcaaggcttgtaagccagttatgcagctgctgggtgtcgaactgctggctggggtgccagcgccagccaatgctccaaccgccctcttgagcctgactcaggcaaatgggttggtcaggatcggtccagatagccggcatttgccccaggcctgtgggcacggcgaagttatccacagccgcaacagcccgtgcgtcaaggccgggtaaatgcgctagcggtagatgcgcctggcgagtccagtaaagcgggcattctggtaactgccgctcgatcacctcgcgctgcgctgcattcagtgcttcgtctttgttcaataccagcaacccggcactcgccaacgcttcctgctgcgctgggggcaagggtttgcccgccgccagcgcttgcgcatccagcaccagcacgcacggctggacggccagcacgttgtgccacggcgcttcgcgcaactgcttgagcaactgcgccggatgacccaggcccgagggttcgataaacaaccgatcaggcttggccttacccaacaagcgacccaagcctacttggaacggagcgccattcacacaacacaggcaacctcccgcaacttcgcccaaggcaatgccgtcgtcatcttgcgtgagcaaggcagcgtccaggccgatctgcccgaactcgttgatcaacacagcccaacgctcattggctgggcgttgggcgagcaggtgctggatgaggctggtcttgccggcgcccaagggcccggcaatcacgtgggtgggaatgttctgcagcatgagaggcatcgttcggaccgtgtagagcgtttgatcctacgcggttatgcgagccaatccagtgtcaggatcaagcggcgctcgtcggccttcagtgcgggcgaacggtgaatcaggccatggccttcattgccatgccatttggtgcccttgagcaaggccacttcgccgcagtggatctgctcgatacgctcggtgggttcggcatccggctggctgagtttgcgacggtccatcacgccttcacgcaaccactggctgccaaccccggcataggtggtgatcaggcgcaccggcacgtggtcgacgtgaaaacgcgggcacatggctttatccaacagacgcaggcgcacgccgatccgcttggcgccgagcaggcaggcgaacgcactgaccagccacgacacatcggcgataaagccttcgtagccctcaagatcacgacaactggacgccaaaccctgcaagttgggctcggcatcttcattgttgagctcgatgaccatggagtcggccaacggctcgttgagcgacaccaacaacgcgccgaactcggcgatgtgcagcggcaactgacgctgccacagcgccaggttgacgccgtcttcgaggatgtcggacagcgccagcggggtgtcaccacgggtctggcgaatcacgggacgcagggggataaccggggccagcatcaggcggctgcctcctcataccaggggccaaaagggtcggccagcaggcgccagccttcgacgcccagggccatttcttcatcggtgagcaagcacgcatccaactcggcgcgcattcgggtgaagtcgatgttctggccgataaacaccagctcctggcggcagtcgccagtgctcagttgccagttgcccatgatcgccgcgatgctctcttcgtcctgaggccattggcttttgggcacaaagcgccaccagcggccggcaaacccatgacgcatcagaccgccggcctgggaccaactgcccgcatcctggtgtttgctggccagccagaaaaaccccttggagcgcagcagtttgccgttgacccaggggcggtcgataaagtcgaaaaagcgctgcggatgaaacgggcggcgcgcgcggtaagcggtggaggcgatgccgtattcctcggtttccggcacatgttcaccgcgcaattcctgcagccagcccggcgcctgggcggcgcgctcgaagtcgaaacggccggtgttgaggatcttgttcagcggcacttcgcccatgaccatcgggatgatttccgcctgggcgttgaggcgctcgaggattgccatcaactcttcacgttcgcggctgctgatcaggtcgatcttgctgataaggatcacgtcggcgaattcgatctgctcgatcagcaggtcggtgatggagcgctcgtcttcttcaccgagggtttcaccgcgcgaggccaggctttcggcggcctggtagtcgagcaggaagttcatgccgtcgaccacggtgaccatggtgtccagacgggcgatgtcggccaggctttgctcgttctcgtcacgaaaggtgaaggtctcggccaccggcaagggctcggagatgccggtggattcgatcagcaggtaatcgaagcgaccttccttggcgagttttccgacttcttccagcaagtcttcacgcaaggtgcagcagatgcagccgttgctcatctccaccagtttttcttcggcacggttgagggtgacgtcgcgctggacttcgctgccatcgatgttgatttcgctcatatcgttgacgatcaccgccacccgcagattttcgcggttgcgcaggacatagttaagcagcgtgcttttaccggcgccgagaaagccggacaacacagtaacggggaggcgattgggcatcaggtattcctcatcagggttggccggtcaaatcgcccgtttatggcgttcgcgcagctcttcacgttctttggcttcgatacacagggtggcggtaggacgcagcaacaagcgcttcaggccgatgggctcgccagtctcgcggcaccagccgtactcgccgcgcgccagcaattcgagggcgtcgtcgatcttgtccagcagcttcttttcccgctccagcaggcgcagttgccattgacgctgttcttcagcgctaccgacatcggccgggtcgctgttggtttcctgctcgcgcagcagcaggaattgggcgtcgatacgcgcttgcagctctttgcgttgggccagcagcaactcacggaagaagccttgttgggcctcattcatgtagtcgtcgggcagctgggccagcaggtcttgttcggtcatggagagcggttcacgggtcaggctgtgcttttatgttatagtataacaatacaaataagccaataccctcttgctcaccacgacgaagggcgcaatgcttgaacacttccctgccgcgagaaacctgatgaaatacctggtgtgcgccctgtttttggctgcggcgggacctgcctgcgcccaggcccccagcctgttggcccactgcacgcgcagcgccaacctgctggcttgtgtggatccattgggcaatgcctacagcgtggcgaccgtcggcagtaccacgtatttgcgcgggtatgaggtgatcggcaagcgctactgggcgcagaccaacagccgctacgggcagctgacgttctttaccgggttggcgtcggatggtgaggcgtgggtcggctacacgcggcgcgtgggctggaccaccctcaaccggttttccagttcgggtggcgccagcgccaaattcacctgcagccgtataacgggttgctagacctgggcgttcttctgttcctgcacccacgccatgtagctgttcatcggtgggttcttctggaaatactttttcaagccttcgaacaacccatcggcaactgcctgttgatgccgcgcggtgaccagccgcgcgctgtcccgcgcattggaaataaacccggtttccaccaaaatcgatggcacgtcgggtgacttgagcaccgcgaatcccgcctgttccacgcgtttctgatgcaggctggtgatgccttccaggctgcccaggatcgaattgcccagttgcaggctggaggcgatggtggcgttcatcgacatgtccaggatcaccccggcgagcatcgggtccttgtccttcagattcagcaggctggtggcgccaagcaaatcggcaccgttttcccgctgcgccatgaacctcgccgtggcggacgtcgcgccgccttcggacaaggcatacaccgacgcgcccgaggcagtaatgcgcggtgccgcgtccgcatgcacggagataaacatgtcggcattgtgcttgtgagcgatctccacccgtttgcgcagcggtacgaagaagtcatcgttgcgcaccaacttcacatcaaagcccttctcgcgcttcaagcgtttggccaacagttgcgcgatggacagcaccacgtctttttcgcgctggcccttggacccgaccgcgcccgggtccttgccgccgtggccggggtccaccaccacaatgatgtcgcgcttggggtgcgccttatccacgcgcggcgcaggttcggcggcaatctggcgaggcgcctgggtggcgttggtcaggtccagcaccaggcgatgaccctggccgtcctggggcggcaatagaaagctgttgagctgcatcggtgcgaccaggtccagcacgatgcgcgtatcgcctttaccaaaatgcccagagcgaatcgaggtgatgccgctgttcttcaacgccaactgagagaaatcaccgctgaggccggcgccgctgaggtcgatgatcaggcgttccggcgcgctcagggtgaaggtcttgtattgcaccgggccgctgagatcgaacaccaaccgcagcttgtcgtccgaacgccacaggcgggcgttgctgatctgcgtggcgtgggccgcgaatggcaaggtgaaaagagggctggccagaagcaggttaagaagctgacgtctgtgcatgaaaagtaccgcaaaaaaggagcgtccctgctcgacatgactgaaaaaaggctggcgcagaaaaaccatcgtcgacacaatagttatactataacatgtctttttatttccaatgatggacctgctcatgaatgcgctgactctgccggatatcgccgcgcaggcttcacgccaagccttgccactcgactgggtaggcatgtgcggcatcgccctgccaatcctcatcgacggccagcgcctcaccgccagcgccgatgcgggcgtgagcctggacgatggcgccgcccgtggcattcatatgtcacgcctgtatctggcgctggagatgctcgaccagcagccgcttacgcctgcacttctgcgtaatgtactgcagcgttttctcgacagtcatgaaggtttatctaataacgcctacctgcgcatccacactgatctgctgctcaagcgctcggcgctggtcagcccgttggccggctggaaaggctacccggtgagcatcgaagcgcgcctggaaaaacagatgttccacgtggaactaaaaattgacgttacctattcctcaacctgcccgtgctcggctgccctcgccaggcagttgattcagcagcaatttcttgaagactttggcaacaccccgctgcagcatgaggacgtgttgacctggctcggcagcgccaacggcatcgtcgccacgccccacagccagcgcagcaccgcgcagttgctgatcgaactggatggcgaccaacccagcctgcccatcaccgaactgatcgataacgtcgaagccgccctcggcactgccgtacaaaccgctgtaaaacgcgcggacgaacaagccttcgcactggccaatgggcagaacctgatgttctgcgaagacgccgcccgccgcctgaacctcgccttgaaacgctcggatgccgtcaaagccttccacctcaaagtgatccacgccgaaagcctgcacgcgcacgatgccgtggctgaaagccgctggacgagaaaccctgcatgatcacctgcaccgccttacgctggggcgccccgggccaaccactgacgcccggcgtcgacctcacccttgagaaaggcagcctcaccggcatcatcggcgccaacggcaccggcaaaagcagcctgctcaaagtcatcgccggcctgcaaaaacccttggcgggcaaggtcacggtggcggttccacgccgtggcggtctgtcgtttctgccccagcaacagcacctggaccgccagttccccatcagcctgcaggaactgatcgccgccggattctggggcacccagctctccccgcaacaacgcagccagcgccttgaagccgtgttggaggactggtgcctcagcggcctggaacaccgcccgttgatggcattgtccggtggtgagctgcaacgcgcgctgctcgcccgcatgagcctggccgaagcgccggtgctgctgctcgatgagccccacgcagccctcgatgaagaaggccaggcgctgtgctggaaacacatccacgcctggcacgacgcaggccgtacgctgatcgtggtctgccatgacctcgcttccgtgcgccaccacacccagcaggtggtgcagatcaaaaacaccggctgcctgttcggccccagcaaagagctgatccgcccacagccccaaatgcaggtggcctgatgcacttcgccgcccacctgtggatgcccttcctcgacttcgtattcatgcgccgtgcgctgatcggcggactggtactcgcctgcagcaccgcaccgctgggggtgttcctgatcctgcgacgcatgagcctgatcggtgacgccgtggcccacggcatcctgcctggtgccgccctcggtttctggtttgccggcctcagcctgccggccctaaccatcggcggcctcggcgccggcctgagcatggccggcctgtccgcatggatcacccgccgcaccggcctgcgtgaagacgccagcctggccgccatctaccccatctccctcgccgccggcgtgttgatcctcggcatcgccggcaagcgtctggatctgctgcacctgctgttcggctccgccctggccgtggatgaaaccaccctcaccggcatgctctgggtctcggggttcagcctgatcgccatggcggtgatctacagaccgctgttgctggacaccctcgacccgctgttcctgcaaaccgtcagccgcctcggcccactggcccacgggttgttcctgaccctggtggtgctgaacctggtgatcggtttccaggccatcggcgccttgatggtggtgggtttgatgatgctgccggccatcgcttcgcgtttctggagccggcgcctgccggtgttgatcgcagtatcggcggtgctgggatgcctgtcggtatggctgggtttgttgctttcgttctactactcgctgcccagcggcccggccatcgtgctggtggctggcgccgggtatctgctgtccgtggtcttcggtccggtgcacggcttgctgcgccgcccgccctcccttacatcccaatgaggtgtttcccgatgcgcgctttactcgtgctgttcagtctgctgctgccgctgtcgatggcccaggccgccgacaaactccaggtggtgaccagtttcagtattctcgatgacatcacccaccagatcggtggcgatcacatccagatcagcaacatggtcggccccgacgccgacgcccatacctacgagccaacgccggacgatgccaaggcgttgctcaaggccaagctgatcatcaagaacggcctgggcttcgagccgtggctggaccgcctggtggccagcaccgaaaccaaggccaccgtggtcaccgccagcaaaggcgtgatttcccacaccatggaagaagacggcgaaaccattcctgacccacacgcctggcataacctggccaacgccgaaatctacgtgaacaacatcaccaaggcgctggtcgccgccgacccggcgaacaaggcggattacctgcgcaacagccaggcctacctgaaagaaatctaccgcttgctggccgaagccaaggccaagttcggtgcgctgccagcaggcaaccgccgcatcgtcacctcccatgacgccttcggctacctgggccaggcctacggcattgagttcctggcgcctcagggcttgtccaccgaacgtgaaccctcggccgccgaagtcgccgcgctgatcacccagatccgcaaagacaaggtcaaggccgtgttcatggaaaacatcaaggactcgcgcctgctcaagcagatcgctgacgaaagcggcgcgcagatcggcggcacgctgtactccgatgcccttgctgcagaaggcccggccagcaccttcaccgggttgttcgagtacaacctcaacactctgtgtgcggccctgagcaagccatgaccctgagcatgctcgacctggaaggggctgccgtgggcagccgctttccactggaacctgtactcgatgcactgccgtggaacagcgacggcctgatcgccgccattgcccagcaacacggcagtggcgtggtgttgatgctggcctggatgaaccgccaggccctcaaggaaaccctggccaccgggcaagtctgctactggtcgcgctcgcgccaacagctatggcgcaagggcgaaagctccggccattggcaacagctggtcgaagcacgcctggattgcgacggcgacgctgtgttgctgatcgtcgaccagcaaggcccggcgtgtcacaccggccgccccacctgcttctacaacgctatcgatggcgaccacgttcacatcatcacggagccctcagcatgatccgcaaaaacccgtccggcgatcttcccgtcattgccgaatcggcctacgtcgacaagaccgcaatcatctgcggcaaggtcatcatcggcgagaacgtcttcgtcggcccctacgcggtgatccgcgccgatgaagtcgacgccagcggggacatggacccgatcaccatcggcgccaactccaacatccaggacggcgtggtcatccactccaagtccggcgcggccgtgaccatcggcgagttcacctccattgctcaccgctccatcgtccacggaccctgcagcgtcggcgaccgtgtgttcatcggcttcaacagcgtactgttcaactgtgccgtgggcgatggctgcgtagtgcgccacaactcggtggtcgacggccgcgatttgcccgccgccttctacgtgccctccaccacccgcatagggcccaacaccgacctgtcgcaattcccgccggtgagcgtgagcgcctcggagttttccgaagacgtggcgcgtaccaacgtcgacctggtgcgcggctacaaagccctgcaaaacgagttctgagccatgagccgcgtgctgattcgcaatgcccgcctggtgaatgaaggccaggaattcgacgccgacgtactggtcgccaatggccgcatcgagaagatcgccagtagccttgacggctataacgagccggtggaaatcgacgcccaaggccagtggctgctgccgggcatgatcgatgaccaagtgcactttcgcgaacccggcgcgccggacaaaggcagcttctacagcgaatcccgcgccgcggtggccggtggcatcaccagcttcatggacatgcccaacaccagccctgccactttggacctggaaaccctggccgataaaaaacgccgcgccgccctgcattcggtggccaactatggctttcacttcggcgtgagcaacgacaacctcgacaccgtcgccgccctcgacccgcatgaagtcgccggggtcaaagtgttcatgggtgcgtccaccggcaatatgctggtggatgacccgcggatcctggagcgactgttcgccgaagtgccgaccatcctgctggcccattgcgaacacacgccgagcatccaggccaacgaacaacgtttgcgcgagcgcttcggcgacaagatccccgccgtcgcgcacccactgatccgcgatgccgaggcgtgctatcgctcctcgtcctttgccgtggaattggccaagcgccatggcacgcgcctgcacgtgctgcacctgaccagcgcccgcgaactggcgctgttcgaagacaaacccctggccgaaaaacgcatcaccgccgaagtctgcctgcaccacctgctgttcgatgaccgcgactatcaccgcctcggccaccagatcaaatgcaacccggcgatcaagagccgcgccgaccgcgacgccttgcgcctggccttgttgagcaaccgcctggatgtgatcggcagcgaccacgccccgcatggctgggcgcaaaaacagctggattaccgtgaagcgccggcgggcttgccgctggttcagcatgccctgcccgcgctactggagttggtagccgatgggcacctgccgctggcgaccctggtcgcgaaaaccagtcaccgcgtcgccgatctgtttgccatccccgatcgcggttatctgcgcgaaggctattgggccgacctggtgctgatcaaactcgagcccggaggcaaaccggtcagcagccaaccaatcctggcccgctgcggctggacgcctttcgccgagcgcagctttcgccatagcgtcagcaccaccttggtgtccgggcacctggcctttcataacggtcaggtaatagacagctgccaaggattacctttgcatttccagcgctagagaagacggcgatgatccgcatcaccctgccagacggcacccaacgcgagtacgacggcgctttgtcagtttatgaagtggctgccagtatcggggcggggctggccaaggcagcggttgccggccgcgtcgagggtgagctggtggattgcgagcacgtgctggaacaggacacccggctccagatcatcaccacccaggatcgcgaggggttggaaattctgcgccgctcctgcgcgagcctgttggcgatggccgtcaaacaactgtttcccagcgctcaacgggtagccggggcggtagtcgaagacggtttttactttgacttggcctacgaacgcgtcttcacaccgaccgacctggaactgctcgaggcgcgtatgcgccagctggcaaacaccaatcattcggtacggcgcttgggagattttgacgccccaagccaaggccccctcgtgccgagcacgggtgtgatccaggccttcaaactgaccagggttgtcagcaatgcgtcacagcagcgcatcacaggcacctgctgggccagccagcaggtggcggtgctcacgatgagtcaacaccaggtcgacttcggccagcaggtatgcgatgcactgaaaggcgtgggcgtgcgggcgatcatggaccggcgcagcgagaagatcggctacaagatccgcgaacacagcctccacaaaacgccgtatttggtgatagttggcgagaaggaaaaaaccggcggttacgtcagcctgcgtagccaccggggagaagacctcggccagatgagcgtcgaggccttgtgcgaaaggcttaagcgcgaggcttgaccgtaccgcaatcgttacccagccactgggcgtggctgtccaggctgcccttctgctgaatgccggtggcattgaaggtgccgttgacggtggtcgtaaactctttctggctttggaacgtagctacacccgtgccctgggctttcgggcaactgaaacggaatttccactggttgccggtcttgtcggtcacttgctgtttgcagcccgattgcgggtcggtcagggggatagaatcagaggccacctgtgccggcgtcaggcacacctgcacgcctttgccagccatggtgatgccttgtttttccagcatggcgcgctgctcaggggtcatctgctgcttgagttgaccgaggatcagcgacaggtccggcaggtcctggttatcgactttcatattgctggtggtcaattcccacaagcccggcgccagcatctgcgcctgtgctgccacgggcagcgacaaaccaataaccatggctaaaccaaacagacgagcattcatcgggtaactcctgggcaattgttggcgttagacgccgcaaaggcgtcagtgttgcacgccaaataaaatagcgacattcgtgaccgaacatggtctgttaggcactggattgtctggagtaccgtcgtccatggatttttttggcccgcacctgctcgcctacttcatcgccacgctgcactttctcgggactctcgccgcgatccacgcggtgctgaccgtcaggaccgcccaaggctcgatcgcctgggccttgtcgctgatgttcatgccctacctcacgttgatcccttacctgatcttcggccgcagcacgttcgacgcctacatccaggcccgccgccaggccaaccaggaaatgcacaccgcgatcaccgcgctgaactggcgcccctgggtcgaggaagccctggcagcacgcaactccagcgcctacacctctttgcgcgccatgcccaagctgggccgcatgccgtgcctggccaacaatgaagtgcgcttgttgatcaatggcgaggccacgttcagcgcaatcttcgaggcgatccgcaacgccaggacagccgtgctgttccagtttttcatcattcatgacgacgagcttggccgccaactgcacgccctgttgaaggaaaaagccgctgaaggcgtagacatccacgtgctctacgaccgcatcggcagccacgccctgccccatcgttatgtacaatcgctgcgcgacgccggggtaaaagtcaaagcgttcgccacccgcagcggctggctcaatcgcttccaggtcaacttccgcaaccatcgcaagatcgtggtggtggacggcatcaccgggtttgtcggcgggcataacgtcggcgatgaatacctgggcaagaaaccaccgctggcgccgtggcgcgacacccatgtgcaggttaccggcccggtggtggcgtgtttgcaggagtcgtttgccgaagactggttctgggcggcacgcgagttgccgccgctgatcctgccggacgcctacccggaagacggcgtgctctgccaattgcttgccagcggtcccgccgccccatatgaaacctgctcattgttttttgtcgaggccatccacgcggcgaccgaacgcgtatggatcaccagcccgtacttcatccccgacgaagccgtgttcgccgccctgcgcctggcggtgctgcgcggggtcgatgtgcgcctgttgctgccctcacggcccgaccaccgcatcgtctacgcggcgtccagcctttacgcgatcgaagcggtgcgcgccggtgtgcgggtgttccgctacacgccggggtttctgcatcagaaggtggtgttggtggacagcgaaatcagcgccatcggcagtgcgaacatggacaaccgttcgttccggttgaatttcgaagtgatgttgctgacggtcgacgaagccttcgctcgggaagtcgagcagatgctgctggacgacttcgccctggcccacgaggtcagccagcaagaaagccgcgagacccgccgcctgcaacaactgggcatgcgggtcgcgcggcttatttcaccgattctctaacacactgcggtgaaccctgtgggagggggcttgcccccgatagcggtggttcaatcaactcaggcattggctgacacaccgtcatcgggggcaagccccctcccacacttggaccttcattgttctcagaaacggggttagcggtagatatcttcccgcgtccacggcaggtcgtggctgccatcggcatggggtttcaccgccaggatctggtgcaggttgatccagccccgggcaaacgcgtacgcacaaccggccaggtacagccgccagatgcgtaacgcctgctccggcaccatcttcgccgccgcttccaggttgtcttccaggcgctcgctccaatggtccagggtgcgcgcgtagtgcaaacgcaggctttcgacgtcgaccacttccagcccgacttcactgagttcgacggtcatcatcgccaggtgcggcagttcgccgttggggaacacataacgctcgatgaactccccggcgccacgaccgaccgggcgaccatcggtgtgcttggcggtaatgccgtggttcatcaccaggccgccttcgcgcacggcgccgaacagggtctggcagtactgcgccaggttggcgtggccgacgtgttcgaacatgcccacgctcaccactttgtcgaaacgaccgtcttgcggcaggtcacggtagtcgagcaattgcaggtccacctgatcttccaggccctcggccttcacccgttcccgggccagtgcgagttgctccttgctcagtgtgatgccaaacactttgaccccgaactcccgcgcggcaaaccgcgccagcccgccccaaccacagccgacatccagcagatactcgcccggctgcagccgcagcttgcggcacaggtggcgaaatttgtcttgttgcgcctggtcgatggattcgctgccggtttcgaaataaccgcaggagtacgccatatcctggtccagccacagctggtagaactcgttggacaggtcgtaatgataggaaatggccgctgcgtcggtggccttgtcgtggatcgagcgcaccggacgactcccctcgtcgtcttcgatcagggcatgactcaattcgtcacacacccggatgacctcggagatagagccttccagctccagtttgccctcgacgaaggcttcgcccagtgaatcgagcgtgggatgggtcagcttggtcacgaccgtggggtccttcaccacgatggtcacactgggctcggggcccaagttgaattcatggccgtcccagagtcgaagacgcagcggtagctgaagattctgtaaggccggtggaagttgcgcgagcatgagtagtccccccttgtttcagacgtctgctgtgagggtagaccatcccaagacaaagtaggaggctatcgatttgatagccgtcttctatggggctcggcgctcgagcaaaccgtcctggacccactgtttcagccacgtcacggcctgcagtggggcaccctctgcataagtgactgccagttccgcgcacagttctgaaaaactccagccggtggtcaccatgcctgccagggcgcagacttcagcgggttccaggctgcggtaatggcacacattctggtgccgccacaccaggcagatgtgcgccgggtcgagcgtatggctgtgggggaagtctgagtcatccttgctggcgcgccagatcgccacggtattgaagtggcagaggacctgttgcacggagggcgccagcgtgacttgcaggcccggccagtcttcaggcgccaggcttgccatgtcgtggagggtcagcggttcgccctgcggcgcatcaaacgccagggtaaacgcccactccaaccgcgccagctccgccagcggcgcactttgctccgccaccaggtgctcaaggataaacgtcgggaaacgctcacccaaccagcgcaggctgtaatgggccgagggataacggcgcacgtaggctttggtcagcgcggcgaattcatcatcccccaaccaatagtgaatggcgctgaagtcatgccgcaagacgtcctgcaaccgcgagatataggcgttgtgataaatcgccaggcccgtgtccacatccagcgtcggcccgcccagcagggtcgcggcgaagccactgttggccacgggtgtttcggataacaggtgctgttcaaaggccaactgccaatcggtcaggcgcataaaggtctcctggccaacgccatggcccccagctcacgggccttgctcagctcggtcagcaactcttcgaagggtgggaaatggtcgtcccgctccaacagcgtcgacacagggcccaggtgctccagcgtttgttgatagagcgcccacaccgggtcacacacagggtggtcatgggtatcgaccacgtagtcgccgtagtccatgtgccctgccaggtgcagctggcggatgctctgcggcggcaggttgcggataaacgtccaggcatcgaaaccatggttgcgcgagctgacgtacacattgttgacgtccagcaacaactggcaccccgacaggtgggccagggcgttgaggaattcccactcggtgaattcatcggccttggagcgcacgtagctggagacgttttccagcaccagcggacgttccaacacatcctgcacttggcgcacgcgggcggccacgtggtagaggctttcttcggtgtaaggcagcggcagcaggtcatgcaactggtgggcgctgccgcggctccagcacaggtgatcggacacccacgccggctggatacgctcggcgagctgtttgatctgcttgaggtagtcggtatcgagggcatgcggcccgccgattgagagggacacgccatgcatcaccaggggataacgctcggctatcgcatccaggtagtacaaggctttgccgccctggaccaggtaattttcggagattacttcgaaccaatccacggccggcgactgttcgaggatctgctggtagtactcactgcgtaaacccaggccgtaaccgaggcttggaagggaggcaggcataagacactcctgggaagtgtccgcagcggtgaggggcagccgctgcgggagcactgggttgccggttattcgccgacggtgccgcccttggcgtcgcacatcgacttggtcatcgacaggaagccctggcctttgcaagaaccctgacctttgcacgcatggtccttggtcttgcagtcgttctggcctttgcaggcgttgacgccatagcagtgaacggtggcgtctgcagcctgcacctgggtggcaacaccggcaaacatagtggcggcagccatagcgagagcggcaccagcagcagcggatttgatgttcattgttgtgttcctcatgatcgtaggggtgtcggtctgaacggattgttcagtctcgacataccactagagtgaggcccctcatccgcgttacagctgtgtgcaaaaatttctgaaaattattcttcaagcttcaaaaggggttcctgaaagcgcagcaaacgcccggcattgcccagtaccagcaaggtactgaggttatgcaacaccgccgcaatcatcgccccggcagcgcccaaccagccaaacgcggcgaatatcacgatagccaaggtccagcccagaccgatgatcacgttgacctgcagcgtctgccggcactggcggctcaagcgcacgcacgtccccaggcgccgcaagtcactgccgatcaacaccacatccgccgacgccagggcgatatccgccccgcccgcgcccatggccaccccgaccacaccggccttgagcgccagcgaatcgttgatgccatcgcccaccaccatcggccggaaaccgctgccgatttcacccagcacgcggttgagcttgtcttccggcagggcctgggcttcgacgtcgctgatgcccacgtccagcgccaggctgtccgcgacgctctggcggtcgccggtgagcaacagttggcgaccaaggccgaggtcacgcagctcttgcagggcctggcgggcttccggcttgacgctatcggccagcagcagccaggccaggaactgaccgttcaacgccagcccggcgatggggccatcgtggttcggcaccgcggtggtcaagatgcccaactgctcgaataactccgggcggcccaaggccgcttcgccctgatcggtctgcgccaccacgccgaggccctggcgttcgcggatgtccgtcaacgccagcatttgttcctgcgtcgccaaccccgccaatgcccggctgaccgggtggctgctggccgagcccaggctcgccgccaggttcaacagtacctgccggtccggcgccgtggtgtcgatggattgcaggcgcaaggtgccaaaggtcagggtaccggtcttgtcgaccaccagcgaggtcaggtccgccagctcttcgaggaacgccgagctgcgaatcagaatcccatgccgcgccgccacggcgatcccggcaatcgccgtggccggtgccgacagcaccaacgcacacgggcacgccgccaccagcacggcgagcatcgcctgggcgtcattggtcacaaaccaagtcaccgccgccaacagcagcaccagcaccatatagctgccggcataccgctccaacagccgcgtaatcggcggcttggaacgctcggcgttctgcatcagcgcgatgactttgcccagggtggactcgttcccggtgcgggtcacttgcaggcgcagcaacccatcgaggttgatcgccccaccaaacacctgcacacccacgctggcttccagcggtaccgactcaccggtaatcggcgccgtgtccaggctcgcctggcccgacagcaccacgccatccgccggcacccggtcgccggcacgcacctcgacgatgtcgccggtattcagcgtgccgttgtccacttcctggatgctgccatcggcctgcaccaaacgcgcatggctgcgggtcagcttgcccagggcatggatcgcctcctgggaaccgatcacgctgcgttcttccagcacatggccaaaaatcatgatgatcggcaacaacgcggcggtcagcaggtcacccgtagcccaggcgcccagcatggcaagagcgatcaactggtcggtgataccgtgcaggctcgggaaccgcaggctgtaccaggccgaacgcatcaccggcaccgccaccaacagcgacgcgacacccagcagcaactggctcacgccgctctggtccggcgccagccagcgccacaccaggcccagcaccagcaaccccagggccagcatggccagggtcaattgccgggcagcactgcgttgctcggcggaggtcagcatgggtgcgctcattgttcggctccctggatgatcaagcgggagtcgtctttcggatcgaccgtggtcaccgaaccggcctggccgagaatcttcggcaggcgctcgcggtacaggcgcagcagcaagcccgggtctttcacctgggccaggctggcgaccgtggcggtttgcgcctgggcattggccaggcgttcactggcctgggcatgggcgacttgcaccaggcggtcggcctgctgggtcgcggtctgggtgagtttctcggcgtcggtgcgcgcgttggccacggctttatccgcctgctggctggcggtgagcaccgcattgaaggcattcaccgccgggcccggcaggctcgactgcacgtcgacgcgggtcacttcgatgcccaaccccaagcctgtggaagccaactccacgagacgcttattgatgccttgcaccaggtcgccgcgcagccgttcgcgacgttcggcggcgccgttgtcggtgccgatcagttcggggcgtgccaccaggatcgtatccaggtcacgcgcagcggtcagggccacggcgctgcgggtcaccaaccgatccagggccggcagcacatgctcgccctgcaacacaaaggcgtaaggctcggtgactttgtagaacacccgcacatccagctgcaccacgccggcatcgccagtcagcaggtaaccggaaccggccagtgcatcactcaacggcgtggcaaaactggcgacgcggtcggcctgggtcgccgcatcggaacgcaacaggttctccacccgacgctcgatcacccggtcggccgccggcaacagcaccacctgctcgaacggccgcggccaggccagcaacagcccggcattctggatgcggtcgagggcgccgaagtgcagcaccacagcgcggttctgcgggtcgatctggcgcacattggaaaacgcccaggccagtgccgccaatacagtcaccgcatacagcgccaggaaggccaggcgcccggcctggatccacgggctgtccgggctgtcacgctcggtcatggctggatgtccttcggcccatccaccaacgcgcggaacggtgcagcgtcggtgcgcaggatgatcttggtgcccggcgtgaccacggtgcccaaggtatccagcgagcgcagcaggttatacaactgcggattgccggcgtaggcgcggccatagatctgcgcggcttcgacccgggactgggcctcgatatcggcggctttcaccgtggcgtcggcctgcacgatgcgcgcatcgcgctcggcggcagagcggatctgcgccgcctcgcgtttgcccacggcggtacgttcggtggcgatggtttcacgctcggcgcgcatgcggtcgacggtggccgtcagggtcaccgacggcagcgtcagccgttcgatcccgacctggaccacgcgcacgccgtaggtattgagcaattgttgatcaatctgctggcgcagttgtgcttcaaaatcagcgatgcgcacctggctggcatcggtgttgatcaggctagacaggtcgaagctggccgccgtggtttccagcgccgagccgacaaaggtgcggatctgccgcgccgcttcatccggctggttctgcaccgcacgcatgaagcgctgcacattatccgcatcgccctgcacctgccacgccacgtacgcctgcacgatgatgcgcaggccatcgcgagtgcccacatcctgcaaaccgctggaggtggtgcgcaggcgcaagtccaccgggatcgccgcttcgaacggcgccggccaacgccagcccaggccgggctccagcaacacccgcgccgggttgccgaaccgggtaatcaccgtggcctcgccggaccgcacctgcaccaggctggcggccgcgaccgcaaacagcaccagcaacaccgcccaggccatgcgccgccaggggaatgggccggcgtgctcatcagcgtgatgatggtggtggtgatggccatgatgatgaccgtgatcgtgagaatgagcgctcaacggaccgactccttattgaacggctttacgcggctgcgaaggatcggccggcaaggtaaaagaacgcagatcgatcgttggcgcgccatcggcgcccaggcgatgatccaggataagcagcttggcgtgggccaggccctggctgagttgacccaagtactgttccagcacgaacgcctggccggcggtggcgtaggccttttgttcggcggcaaaacgcaggtcggcggcctgggcgccggcgttcacttcgcgggcggtggccgtggcctggtcgcgggcggtgctggcttgcagcacggcctggttggtttgctcgctggccgcgccgcgctcgcgggagatcagcgcctgggctccgatctgcgcggcttgcacgccgtggtaggcgttggcagcgccggccggtgggtggatcgcctcgaccaccgtggcgaggatttccacaccgctgccgagcgtttgcaggtcagcctgcacggcgcggccgatttcgtcggccaggttcgtacgttgctcgccgagcaattcgtcaagggtgcgcgaggcaaagtcatgcaccaggatgcggctggcggtgctgcggatcaggctcggcacattggcgctgttataggtggcagcgagcgcggcctggtcggtgaggccgatgcggtagacgaaacgcacgtccatgttgacgatctggaagctctgcttgtcgccgctgctgctggcgatcacctgggacttgtcgttcacatgactggcgtcccacaagcggttggcgatcagcggcgccgggccttcggcaggcgccaactccggcgtagcggcgtcgctgacgctggtggccagctcatgcaccacgccgttctcgacgctgatcacacgacccaacggccagggcaagccagcatgcaaaccggggccgaacacctcgacgggcttgccgaagcgctcataaatcccacggccttgcaggggcacttcgtgcacgccggtgagcacccaacctaccgccagcaccaccagcagcaccggcaggaacgcccggcgcatgtaggtaaacgcccagatctggcgcaggtcgatgccgaagcggttgtgcaattcgtgctgcaaggcgagcaagggttgaggcggccagcgcagcagcccggcgatgaaactgtgcgccatcaggcggggctcaaggcggggctggcgtgggctgaacagcgacaacacggccctcagtacaaactccagcgagaccagtgccggcagcaggccgatcaacaccgccaggcgcaatggccagatggactcggcaccagcgaacagcaggcaaatcgcgctgactaccaggcacacaatcgccacccgactcaactgcgcgagctgcccggcttccggccattgcgcggcggtttcctgggccaggcgacgttcgaacaccagcaagccaaacgccagggccaacgccagcgcggcgccgatgctggcagactggccgaccggtgcagcgggcaaccccaggttccagaactcgacaatgctgatcaacgccagcaacgaccagccaccaagccacaacacgggtgcgccgatctgcttggcaaaacgcagcataaagcgtgcatagcggccggggtcttcaagcggcacttcaaccgcaggttcttccaacgcttgggcgcgccaatccgccacccaccacgccgactgcagcccggccaccagcaacagcaacgccgatgcgcagttgatcaacaccaccggccagatcgacagcggcgcaaacagcgcgacaaacagcgccagcacccaaccggcaacggccagcaccgtcaggctgataccggcctggcgcaatcgacgggcatggaactgcccttgttgaaaacgcggaaggccttctaccgaagcaccgtcagtttccagatccacttgcatccactcaacgcccacgtgtacataattcgttacgatataacacggagcgtgaaatttttgttcgataaacatcgcgttaagcggtacaccgttcccctgtgggagggggcttgcccccgatagcggtgtgtcagtcaacaccggtttcaactggcccatcgccatcgggggcaagccccctcccacatttgatctcccgcaccgtcaagatcgtgactaaccccccagaaacacgcgccatcactggtgcaggcgaggattaatcggcacactccaaaacagtttttcgcgggtccacggacaaggaagcgtcaccccccatgatttcgatctatcagctcaaaccgcgttttcaaaacctgctgcgcccactggtgcagcgcctctacgacaatggcaccaccgccaaccagatcaccgtcttggccggcgtggtttcgctgctggtcggcctgctgatcgccagcttcgccacccacctgtggctgttcgcgctgattccgctgtggatgatcctgcgcatggccctcaacgccatcgacggcatgctcgcccgggaattcggccagcagtcgcgtctgggcgcctacctcaatgaactgtgcgacgtgatcgccgacagcgcgctgatcctgccgtttgcgctgatccccggtgtgagcctggcgccggtgctgctggtggcgctgctggcggtgttcagcgagtacgccggtgtgctggggccgatggtcggtgcatcgcgccgctatgacggtccgatgggcaagagtgatcgtgcctttgtactcggcgtattggccaccggtgtggcactgggctggctgggcgccggctgggtcgacgcggtgatgtggctggtggctgccctgctcgcctacaccctggtcaaccgggtgcgccagggccttaaagaacaacaagaaacctcaccgattgcataaggacttttgcgatgcgcgaacagcagcagcacaccttcagtacccatgatggcgtcgagcttttttatcggcactggccggccacggaaaacaccggccagcgccaggccatcgtgctgttccatcgcggccatgagcactcggggcgtatcgcccacttggtggatgagctgaacctgccgcaattcgacttcttcgcctgggacgcccgtggtcacggccagtctcccggcgagcgcggtgacagccccagcttcgccaccagcgcccgcgatgtgcagaccttctgcgaccacatcggcgccacgtatggcatcaaggaagaaaacttcgccgtcatcgcccaaagcgtcggcgcagtgattgccgcgacctgggtccacgattacgcgccgaaaatccgtgccctggtgctcgcctcgccggcgttcaaggtcaagctctacgtgccgttcgcccggccgggcctggcgttgatgcgcaagttccgtggcaactttttcgtcaacagctacgtcaaggccaagttccttagccatgacccggagcgcgtggcgtcctacgacagcgacccgctgattaccaaggccatctcggtgaatgtgctgctgggcctgtacgaagcggccgaccgtgtggtcgccgatgcccaggcgatccaggtgccgacccagttgctggtctccggctccgacttcgtggtgcaccgcaaaccccagcagcagttcttcgaccgcctgggcagcctgaaaaaagagctgcacatcctccccggtttcttccacgacaccctcggcgaacgtgatcgcgccagcgccgtgagcagcgcccggcgcttcatcctgcagaacttcgaacacccgctggaccgcgcttcactgctggacgcggacaaactcagcgccacctgcgccgaatccgaagcccttgccgcaccgctgccgcgcaactccctgcgcgacctctactggcgcatgacccgcgccagcatgggcttgggcaagaacctgtcggacggggtgaaactgggcttcgacaccggtttcgactccggcagcaccctggactacgtgtaccgcaacacgcccaccggcaagggcgggctggggcggatgatcgacaccaactacctcaactccatcggctggcgcggtattcgccagcgcaagctgaatgtggaggagctgctgcgcctggcgatggccaggttgcgcggtgaagatcgtgaagtgcgcatcgtcgatatcgccgccggccacggtcgctacatcctggaagccttgcagggcgtgtcgccactgccggaatcgatcctgctgcgcgactacagcgacatcaacgtgcgcgacggtggcgcgttgattcgcgagaagggtttgggggatatcgcgcagttcgtcaaaggtgatgcgttcgaccgccaggacctggcggcactcgaccccaagccgaccctcgcggtggtgtccgggctgtatgagttgtttgccgataacggcatggtcggcggttcgctggccgggctggccgaagcggtggagcccggcggttacctggtctacaccggccaaccgtggcacccgcagctggagttgatcgcccgcgccctgactagccatcgccagggccaggcctgggtgatgcgccggcgcagccaggcggaaatggatcaattggtggaagcggctggtttccgcaagatcacccagcgtgtggatgagtggggcattttcaccgtgtccctggcacagaagatctgaacatgcgcgaacccggtttattgaaacctgcggtgctgtggctgctgctgttggcgccgctgttcttcagcacctacggctttgccacctgggtcaccagccagcgcagcgacgtcgtcacgctggtgttcggctgggaaacccatatgccgttctgggcgtggaccatcgtgccctactggtccatcgacctgctctacgggttttcgctgttgttgcccaacacccggcatgagttgaagcaacatgcgctgcgcctgctgagtgcccaggtgatcgccgtgagctgcttcctgatctggccgctgcgtttcaccttcgaacggccggaactggacggtgtgttcggctggctgttcgcggtgctggccgggttcgacaaaccgttcaaccaggcaccgtcgctgcatatcgcgctgctggtgatcctgtgggtcatgtaccagcgccacacccaaggcttttggcgttggctggtgcatggctggttcgggttgatcggcatttcggtgctgaccacttatcaacatcactttatcgacttacccacaggcgccctcgccgggtggatctgcgtgtggttgtggccggtggaacatccgagcccgttgttgagtgcacggctgacgcgagatcccacgcgttggcggttgggcatgcaatatggacttggcgcgatgctgttggcgattccagcatttgtattgggcggcgcctggctgtggctactatggccggcggttgccctcgccttgatcaaggccaattacttcgtgctgggcgcttcgggcttccagaaacgcaccgacggccaactgacccccgccgcacgctggctgtacgcaccgtacctagccgccgcctggatcaactcgcgcctgtggacacgcaaacatccacagcccgacctgattgtggataacgtctggctcgggcgtattcctaccacaagcgagcaagcgcccttcaaggccatcgtcgatctgtgtgccgaattgccgattaatccacaggggcgcgcctatcaatccatccccgtgctggacctgatcgcaccgaccccgaccgaatgcctgcaagccgcccaagctatcgagcatctgcgcgccagcggccccgtgctggtgtgctgcgccctcggctactcgcgcagcgctaccgccgtcgccgcctggttgctgcacaacgggcgagccgcgacggtagagcaggcgctgactatcattcgtacagcacggaccgatgtggtcctgcatcccgcacaccgagaagcgttggagggtttgccccatgcccgctgatatggaactgctggtggttgccagcctgctgcgtcgtggccgttcgctggatcagttatccacaggcctgaccctggccggtgtgctgttcggcctggcgcagttgttgatggcgagtatttcgatcatctgcctgctgctcagcctgtggatgattatcctcgggctgctgcaaaagtactgggcgctgcgcgtggcgttcgacgccgacctgttcgccctgctggcccgcgacatcgagcgcacgccggacctcgaccaggcactgctgaccctcggcctgcaatcggccaagcgtatcggccggccctggaccgaacgccgtcgcggcgccctcaaactattgcgcaaacaagcctggctgctcggcgcgcaagcgctgctgaccctgggcgtgatcctcgccagcccctggctgcctttcgccggataaggaatccccatgttcgaacccgtggtcgccacgctgattacctccatggcccgcaccgtcaccggcgcccgcagcctgtggttgggctgcgcgccggtgccagtgcaacgcatctacttcgccaaccacagcagccacggcgactttgtattgctgtgggcgtcattgccgcagaacctgcgcaaattcacacgtccggtggccggcagtgattactggaacaaaagcgccttgcgccgctacatcatcaaccgcgtattcaacggcgtgttgatcgaccgcgaacgcaaggaccctgtggataaccccttgcagccgatgctcaacgccctggaaggcggtgactcgctgatcattttcccggaaggcacgcgcaacctcgaagacggcctgctgccgttcaaaagcggcctttatcacctggcgaaaagttacccacaggccgagttgatcccggtgtggatcgccaacctcaaccgcgtcatgcccaagggtcgcgtgctgccgctgcctttgttgtgcaccaccagcttcggcgccccgctgcaattggcagacggcgaagacaaagccgccttcctcgcccgtacccgcgatgctctgctcgccctcgccccggagcacgtctgacatggctagccaaaccctgatgttgttcggcggtatcggcgcgatcctggtgctagcctcgctgatcggcctgatcctcaagctgcgcacccgtggcacgcccaacacggtgatcgacaacctcaacgcccggatcaacgcctggtgggtcatggtggtggtcatcggcatcgccttctggctcggcaccggcgcggtgatcctgctgttctacgcggtgtcgttctacgccctgcgcgaattcctcaccctcacccccacgcgccgcagcgattaccccgcgctggtcgccgcgttctacctggcgctgccgctgcaatacctgctgatctattcggactggtacgggctgttctcgatcttcatcccggtgtacgtgttcctgctgctgccgatcctcgcctccctgggcggcgatagcacgcacttcctcgaacgcgcctcgaaagtgcaatggggcctgatgatcgcggtgttctgcgtgtcattcgtgcccgccctgctcaccctcgacattcccggctacgaaggccgtaacctgctgctgatcgcctacctggtgatcgtggtgcagctgtcggacgtgttgcagtacgtgtgtgggaagttgttcggcaaacacaagatcgcgcccaacctgtcgccgtccaaaaccgtcgaaggcttcgtcggcgggattctgctgtcatccctgatcggcgctgcgctgtggtggaccacacccttcaacccgtggcagtcgttcctgattgcactgctgatcaacctgctcggctttgccggcggcatcgtgatgtcggcgatcaagcgtgatcgcggcgtgaaggactgggggcacatgatcgaagggcacggcgggatgctggatcggctggattcggtgtgctttgcggcgccgatcttcttccacttggtgcgctactggtggacctgaagtcaccgctccaaggccaaataacgatcaacatgtgggagggggcttgcccccgatgacggtgtgccagacaacacatgggtagctgacacacagcaatcgggggcaagccccctcccacattcgttctgtggcactgtgccgaaaggttgaatcattccctcaaggctgccggctccctgatggaaatgcccgcgttttcgttaacgtttttcgcgagcaagctcgctcctacagtgattcaccgccattagcccggcaaatgccccagcggcaacgtccctggggttttcacggtctggatcgcgaagttgctgcggatgtccctcacgcccggcagcttcagcaaactacccgtgacgaaccgctcatacccgcgcaaatccggcaccaccacctgcaacagaaagtccgactcccccgacaccaggaacgccgagatcacttccggcaacgccgtcaccgcctcgcggaaggcattggcctcggtgtcgttatgccgctccaccttcacgcccacgaacaccatcatccccagtcccacttcgtcacggtccagcgtggcctggtagccgcgaatcacgccggcttcctccagcaggcgtacccgtcgcaagcaaggcgaggcagacaggccgatttcgtcagccagttgcacattgctcaagcggccgtcacgttgcagggcttcgagaatcttgcggtcaaacgcatcgagtttcagatttggcataaatgaatggccgatcagatattcagtggcagagagtgccaagactagacgcttttctggctgactacgcaagcacctgccccgcccttgcgccctagaattggccgacacacaaggggggtgaaacatggcggaactctggttattcctggtggctctttcggtggcgtatctactgccggggccggacatgatcctgctgctgcaaaccggcgcacgccagggcaaggccttggcgctgaccacggcgattggcctgggattggcccgcgcctgtcatgtggcgctggcgggcatgggcttggcgacgttgttcaaagtggcgccctggaccttcgatgtggtgcgcctgggcggcgcggcgtatctgctgtggcttggcgtgcagtgcttgcgtgcgaacatgctgccggtactcgacacggcccatagcgccacaccggcccgcgcctggcgtgcagcctttcagcgcggcctgctcaccaacctgctcaacccaaaggccctgctgttctgttcggtgctgctgccgcaattcatcaacccgcaatccggccccgtggcagcgcagttcgcgttgctgggtgtgatcctggtggccgtcggtttcgccttcgactgttgctacgccctggccggggcgcgcatcggtcagtggctggcacgcaatcgctcggcgcagcgtgtgcagcagtggttattcggcagtcttttgatcggttttgcggtgcgcctcacctttgtgcaacacgcctagcgggtcggcgtatctgcgtcatcttttgtatcaaagacgcgtgtaagatacgccgcacttagccagggatgctcaccatgttcgattcgttcaaagcgatcagccgccgtattgtcggtgcgttattgactgtggtgggggccgtctttggccagtggcatccgccggtctggctgcgtgccgttggccgtgggctggctaacctgggcagccaagcccgcgcttatccacgtcaaaccggtgccggcgtagtaggcctggcgttgctggcggccgctggtttctatggctggcactggtattccaacctgccgcaaccacataccgcgagctattcgctgcacaaaccgaacctcaccgactacacccagcccacgccggttgtggataacttgcaggtgcgcttcggcgaatccgtggccccgctggcggccatcggcaagccggtcactgagggtatcaccctaaaacctgcggtcgcaggcacctggcgctgggcggacgaccgcagcctgttgttcgtcccggaaaaagactggcccatcgacgcccattacaccctcgacctggcgaagaaaaacctgctggccgacggcgtgttgctggaccagtacagcacgcagttttccacccaaccgttccgcgccaccctggcgcaaaacgagctgtaccaggacccgtccaacccgacgctgaaacagctggtggcgaccttccgtttttcccacccggtagatgaagacagcctacgcaagcgcgtcacagtaaccctcggcaaaggcttggcctaccgcgacgcccagttgcccaaccggccggaaatcaccttcgacgagaagaaactcaacgcctacgtacgctccgctgccctggccacgccgctggaaagcacgccggtcaacgccaagctcgacgaaggcatcaaggcccgcgacggcggcaacgccagcaccgcaccgctggtggcggaagtcaccgtgcccggtcgctatcgcctgacctttaccggcgccgaagtgagctttgtcgacaaccaacgtggcgagccggagccggtgctgatgttcagcagttccagcgccgtggccgatgagaccatcgccggtaaggtgcaggcctggctcctgccggaaaaagcccaggacgacacgcgcccctacagcagcaacgacatcgatgacgccctgctcgcccgcagcaccaaaatcaacctgacccacgtgcccagcgtcgagccgctgaacaccctgcacgccttcaagttcaaggccccggccggtcgcgcggtgtatgtgcgcgtacccgccaacctggaagccatcggcggctacctggcaaaaaatcctacggcgtcgctgatcagcatgccggcgtatccgcgtaccttgcagttcttgtccgatggcgccttgctcagcctcaacggcgaaaaacgcctgggcttcatggcccgtggcgtgcccggcgcccatgtggaaatcgcccgcctgttgcccaaccaattgcaacacctggtggatcagagcagcggcagctttgcccggccgaacttcggcaacgaatattttgatcgcatggtcgagcgtcaggcgttggatatcccgctgtcatccaatgacccggcgaaaaccgtctacgacaatgtcgacctcagccactacctcacggccaacggcggtcggcgcggcattttcgtgctcaagctcagcccgcaggacgacccggccacgcgcacgttcgagtacgaccgcagcagcaccagcgacctgcgcttcatcgtggtgacggacctgggcatcatcgccaagcgctccagcgatggcagccatgacgtgtacgtgcagtccatcggcaatggctcgccggtgtccgatgcacaagtggacatcatcggtcgcaacggtttgccggtaagcagtggccgcaccgacgccgaaggccatgcgcacttcgccaagctggatgaattgcgtcgtgagaaaacgccgctgatgtacgtggtcacgcgcggcaatgaccagtcgttcctaccgatcgcccgtcagtcccaacaattggatttgtcgcgtttcgacgtcggcggcctggaagaagacggtgcgattgatcgcctcagcgcctacctgtttaccgatcgcggcctgtaccggcccggcgaaaccgcgcacctgggcatgatcgtgcgcagcggcaactggaagggcatgctgcaaggcctgccggtggagctgcaaatcaccgacccgcgtgggctggaggtgattcgccagccgctgaagctgtccgccagtggctttgaaacctttgatttccccagcagcgaagtcgcccccgccggggagtacaccgcgaccttgcagttgattggccagaaacagacccgcaccgacctgggcagcgtgagcttcaaggtccgcgacttcgagccggaccgcatgaaggtcagcctgagcctgcatgacacgccggtgcagggctggattccaccggaccaagtggtggccaaggtcaccgccatgcacctgttcggcgccccggcgtccggccgacgcgtgacggcaaaaatgtccctgagcccaacgcttgcggcctttgatcgctacccggattaccgtttccgccttaacgatgccctggaagacgccacgaccgaagacctggccgaaaccaccgtcgacgacaacggccaggccgtgctcgacctcaacctgcagcgcttcgccaacagcacctatcgtttacaggtgatgacccaggtgttcgaggctgaaggcggtcgcaatgtggcggcgcaaagtgccttgctggtgtcgtccgcgccctacctggtgggtgtgaaaagtcaggattcgttgtcgtacgtcgccaaggatgcaccgcgccaagtgcaatggctggctgtcgcgccagacctgacaccgctggcggtggacggcctgaccagtgaagtggtcgagcaccgttatgtgtcggtgctggtgaaacagtccaacggcacctacaagtacgagtcacgcatcaagaacatcagccagcccgcgttaccgttgctgatgacgaaagaaggcgccaagcagaccctgaacacctcagcgccgggcgactttaccctgcaactcaaggacgccaacggcaacctgctgaaccagatcgactacagcgtggccggacgcggcaacacctcgcgctccctggaacgcaacgccgagttgcaactgcgcctggataaacgcagctacgccaccggcgacgagatcgctatcagcattcgtgccccgtacaccggcgccggcttgatcaccatcgagcgcgacaaggtctacacccaacagtggttcaaggccgacagcaccaacagcgtgcaacatatccgtgttcccgcagggcttgagggcaatgcctacgtcaacgtgcagtttgtgcgcgacatgggctcggccgaggtgtacatgagcccgctgtcctatggcgtggtgccgttcagcatcaacctggatgcgcggcgcatggccttgaaggtggaaggcccggcgaagatcgaaccggggcagacgctggatatcaaggtcaacaccgaccgcccgggccgggccgtggtgtacgccgtcgatgaaggcatcctgcaagtggcgcgctatcagacgccggatccgctgggcttcttcttccagaagcgtgcgctggaagtcggcaccagtcagatccttgacctgatcctgccggaattcagccgtttgctcagtggggcggcgccgggtggtgatacggaaggtgcgctggccaatcacctcaacccgttcaagcgtaaacatcagccgccagtggcctggtggtccgggctggtggacttgccggccggcgaaaccgtgctgcattaccaggtgccggacagcttcaacggcaagctgcacctgtttgcggtggccgtggacagtgacagcgtgggtgtgagcgaagccagtaccgacgtacgcgggcccatcgtgatcacgccgaacgtgccggcctttgtggcgccgggggatgtgttcaacgtcagcgccggggtgttcagcaacctcgacgcagcggcggacgtgaagtttgaagtgcagaccagcaacggtctggtggtgcagggtgacaagggcagcacgctgtctctgcaaccgcgcaaggaaggcacggccgagttcaagatcaaggtcggtgacaccctcggctcggcggatttgcgctttgtcgcggtattgccggatggcaagcgcattcaggtcgcggaaaccacctcgatccggccactgagcgaacatcgcgtcgccctgagcctgggccgcttcgacagcgccagcaaagagctgaaaccgacccgcgaactgttcagccaactgcgcgatgtgcaactgggtgtggctgcctcgccgctggtatgggctaacggcctcaagcactacctggacgactacggctatgcctgcaccgagcaactggtgtccaaggccatgccggcgttgatctggggcggcaatgcgcctgaagccgagcaagctttcggcagtgcggtacgcatgctgcgccagcgtcagaaccaggccggtggctttggcttgtgggcggccaaccccgatgtggcgccctacgctagcctctacgccaccgacttcctgatcgaagccaaggagcgcgggctgccagtgccggaagacctgctggtgcgctcgaacgcgtacctgacagacctggccaacggtcctagcgaaggcctgtcggaattgcgcaaccgcgcctacgccagttacctgctgagccgtcaggggattctggtgagtggtgcattgagcgatatccgcgaacgctacgaaagctacttcaaggacagctggcagaacgacctcggcgccgcttacctggctgccagctacaagctgctcaagcaggatcgccaggccgataccctgttccgcaagattccatggcgttcccttgtggataagtgggacagcgacggtttgtactacgacccgctggttcatgacgccgaacacctgcacctgttggcgcgacatttcccggagctgatggacgatgtgcctgcagcgctgctggataaactcggcaagcgcctcaacgagcagcgttacaactcactgtctgcggccctgctgctgcgtgccctggacaactacggccagcgtgcgcaaagcgacatgaccctcaaggccactgcctggctgggtgacaagcagcagcaattgctggaaatggccggtcagccaccgcgcgccgccgtgccgggcgccacgcaaaagctgttgatggaaaaatccgacggcccagcggcgttctacatgctcagcgaagccggtttcgacaagggcgccaagctcaagccgatcaacaatggcctggaaatcatccacgaatacctcgacctcaagggcgagccggtgagcaaggtcgcggtgggtgatgagttcctggtacgcctgcgcctgcgcgctaccgaccgcgatcaggtacaacaagtggccgtggtggacctgctgcctggcggtgtcgagcctgtgtataacttgccgccggagccggaagacgccagcacggaggaaagtgagggcgaagagtccgagtacgtggaagcagacaaccaggaagaacaaagctggcaagctcccatcggggaaaccgagctgagcaactggcagccggagtatgtggatgtgcgtgatgatcgcgtggtgttgtacggcaccgcattgcgcgatgtaggcaccttcgtctaccgcgtgcgcgccaccaacgccggcaccttcaacacgccaccggcctacgccgaaggcatgtacgaaaccaccctgcaagggcgcggcaaagtaggccagcttgaaattaccaagccttaaacgcctggcgccgccgctgcttgtagcggcggtggggctggtggggctgcggctttggccgcatgccccgctggaacacgcggtcacttcatcgcgggtggtgttggccgacgacggttcgctgttgcgcatgacgctggcggatgacggtcaataccgcctgtggctaccgctggagcggatctcgccgtcactggtcgaagccttgctgctcaaggaggaccgcaatttctactggcacccggggatcaatcccccggcgttgctgcgcgcggccacggccacctacagcggtggccagcgccagggcggctcgaccttgagcatgcaactggcccggcgcctgtgggacctgaacacgcgccaggtgccgggcaagttgcagcagatggcgctggcgctgtggctggaggcgcgctacagcaagcacgacatccttgaggcctacctgaacctggcgcccatgggcggcaatatcgaaggggccgaggcggcgagccgcatctacttcggcaagtcggcggcgcagttgtcgttgtccgaagcgctggcgctggcggtgattccgcagcagccggggcgtcgggcgcgcttcgggccgtcactgcaacatgcgcggctgcgcttgatggcggattggcgcgagacttatccacaggacccgcgtaacgacagcctgctcgatttgcctttggaagcgcgtaaccgccagcagatcccgttcctcgccccgcacttgagtgaacaactgctggcctcccaaaccggcaatgagctgaacagcaccctcaacctgccgttgcagcaattgctcgaacgcctgatcaccgggtttatcgccgagcggcgcagcacaggggtggaaaacgccacggccatcctgatcgacagccgcgaccagagtgtcaaggcactggtgggttcggcggattacttatccacaagcctgcacggtcaggtcaatggcgtgctgtcgcgacgctcgccggggtcgacgctcaagccgttcctttacggattggcgctggatcagggggtcatccaccccatgagcatccttaaagatttgcccagtaacttcggctacttccaaccggaaaatttcgacggcagttttgtcggcccactgacagcgcgagatgcgttgatccgtagtcgcaacattccggcggtgtggctcgccagccaggtcaaatcgccctcgttgtatggactgctgcaacgcgccggcatcaagggcctgcgcgacgagagtcactacggcctggccctggccctcggtggcggcgagatgagcccggaagaactggcgcggctgtatgtgatgctggccggtgacgggcacctgcggccgctgcgctatttgcaggaacagccgcagtccaccggtgcgccgttgctcacgccccaggccgccttcatggtgcgcgacatgctgcgccgtaatccacgcccggatggcctgcccggccgccattggcgcactgcctggaaaaccggcacctcctggggctttcacgatgcctggagtgccggcctggtcggcccttacgtgctagtggtgtgggtgggtaacttcgacggccgcccgaacccggcgtttatcggtgccaagaccgctgcgccgctgttcttccgcatcgccgacgccctgcccctggccttgcccaacaccgtcatcaagcccgacaaaccgcccgccgggctggtgcgcatcgacgtctgcgccgcgtccggcgaactgcccaaccgttggtgcccgcaaacccgcaagacctggtacatccccggcatctcgccgattcgcgtgtccaacctgcaccgcccggtgctgatcgacacccgcaccggcaaggccgcctgcccgccgttcgagccgcagtacacccgcgaagaagtcttcgaattctggccgagtgacgtgcaacgcctgtaccgcgcggccggcctgcctcggcgtacgccgcccagtgtgatgaagaactgccagcccaaccgcctgagtgaccagagtgaagcgccgcagatccgctcgccgctgacccaggtgagctaccagttgcgcttgtctcaaccccaggaaagcatcccgttgaatgccaacgcggccagcgatgcggcgacgctgtattggtttgctgatcaaaccttgatcggccagggttcgccgcaagccacactgaactggcggccgggcaagtcgggggagtatcggctgcgggtcagtgatgatcaggggcgcagtgcgagtcgggggttgaaggtggagtttgtgccgtgatcaggtatcttcgtcgccgaagctcgccttgcccacacgcttggcaaaatggttgtacgccgcagccagttttcgttgttcaaagatagaaaacaccagggtacccagcaggatcagcatccacaccagaaacagcttcagcgtatccacatgggccacgaacagtagcagggtcactacgccgccaatcaccatgcccagccccatccacgcccccaacacacgacccacggccatgcgtatgcctttgggcaggaccaatcgggtggtcatcattaccatgatgatcgccaggaagaagccaaacgcggccatgaacggaatctgaaaaccaccttcgcggtacaaccaggccagcaaacgatacagcgggccgagttctaccatctgttgataggtgtccggacgcggcaaatgcaactgggtaatctgctcgggtgtgagggccatgatgcccacgccgatcattcctgcgaaggcggcatagaacccgcccgcacgccacagcggcgccagcacgcggcggctttccacatcctcggtcagcgccacaccgaacacggccttggggtatttgccctgggcaatcacggtctggccgtcccgttcgcaggcatcaccgatcagcatcacatcgaggtcctggataaggaggatttcaccctggcgacgggagctgccgatcgactcgtaatcgtcgggcgacttgttgccgaacagatcgatgccctcggcaatcacagggatttcgccgctggcatcctgcaggcgaaagtcattgcagcacgcctcgctcttggaccggctccagctccagcgcccgtcgtcatccttctcgccgtcctcgataatccacacgtagccggcgcaaggcttgtgatgcaccggcgacaacaacggcttgtccaccattaccttgccacgcagctccaccaagcccatcgccagcgaacgaatctggctcgtcgccagccgctgctcggtcttgtagaagctcggaccaaagctggccaggaggcagatcagcaggaacatcgggaaaaacaacgcgacaaccgtcatcggggcgtagatcagcaaaccgataaagcccgcaagaatcaccagcgccagcacgattttccacttcggctttttcaccacggcgcctaccggcgtggtcttcatgcccctggcacctcaagcttcacaccttcgtagcgggtttcttcggcgctgatcgccagcaacgggatgcgctgataactgagcaaccgcgcaaagaacaggtcggggaacactgcaatggcaatgttgtagaggttgaccgactcattgaagaactcacgccggtcggcaatgcgctcctccaccgacgagatcgcctgttgcagcgcgaccatgttcggtcccgagatcaacgtgggatacccctccgccaccgcaatcaccgacttgatcgccgcgttgagctggttggaggcatcgaccttgtcgttgaggctgctggcattaaggtactgctggcgagcttcactcaagcgcgtgaacagggcgttctcgtggttcatagcggtttggaccacacgcatcaggtccgggatctgatcggcccgctgcttgagcagcacgtcgatgttggcaaaggccttatctacatcattacgccgcatcaccagcccgttgtagaaccccaccatccagcccaccaggccgacgccaatgatcagcacgacgacgccggcgataaggagttcgatgttcatggtgaaggcattccctggctgagttatccacagggtcgcattctaggggtaaaaccggatcgcgcggcgggcactggcccacagaaccgacaagaggtcgctaatgggagatgcctgccctaagtgccggggctcgcttcaagtaagtgcacgtcttgttggatcagcctctcaacgaccttgcatcagctcacggtagattgtgatgtagtcggtaaccatccgttcagctgtgaaatacttccaatagcgctcctctgctcgcagcccccaaatacgtgcgtcttcgggatgctcccaaaggtattgcatcgcgcctcgtaacgcggcagggtcgcccggtggcacaactagcccagtgtcaccggatatattgataaaggtggtaccggtacctatctcgcaggaaatcatcggctttccatacatagcaccttccaataaagatatgccgaaagcttccgagcgaaggtgcgaaggaaagaccacggcataactcagctccagcagcgccaatttgtcactgtcaggcaactggccgaagaaatgcacattatccagccccaaggcgcgagcctgtgccttgagttcatcctcgattggccccgcaccgacaatgactatggggaattcagtgcctcgggccgcttccatcaggatgtgcaggcctttgtaataacgcatcacaccgacgaacaggaagaatttttgccccaccttcgtgcgccaggccttgagcgtttccggatccgcctttggataggtctcacggtccaggccgatgggaatcactgaaaccttgtctcgatagcgtgccaagactgcgctggtggccaggtagttcggcgaggttgccacgatacggtcgacgtcgcgcaagaaccagcgtttcagaggtctgtagagtttcagcagctgtttctggcggatgatgtcggagtgataagtcaccagcgtgggttttttgattctggtgatgaaatgcaccacgtccatgaagggccatggaaagtggtagtgaataacgtcagccctgcgcgcgagttgataaaagcgcaagaacgccgagatcgaaaatccggttgaggcgatttgcagatccatcctggcgtgatgcaccaggtaccccccgacatcaaccgtgcgcggaacctgtttggacgtcaaagaaagtacgtctgtctgcacaccctgcttggctgcgcccagggcgatctggtggataacctgctcgattccgcccatcgaccagggcactgaggttttataaaagtgaagtactttcatgagctccgaataatcgccgccatgcgatctacaaaggtttttttcgagaatttttcagcctgtatctcgcacgcgcatcgcatggcaagtgctctcgcaggattcaggctgttgatcgcatcgcgcaaagattccacgtccaactccggctccagcaatagtccggtcacaccgtccactatagtctctatcaagccaccttcacgtacaccgatcacgggctttccagcagacatcgcttccacgggcgacataccgaaatcttcatccgtcggcacatagatcgctgcacgcgcaccaccaatacaggcacgtaaactggcttcgctttgccaaccggtaaagtggatgttggcagcgccatcggcgagttttcgcaacgccagctcgtcccgaccaccagacgcaattaccagcttctgatcaggcaactcgagaaaagccttgataatggtatcaacccgtttatgacattccagcctcgccagggaaatgaagtaatcgccctgctctgtccatcgaaaacgttcggtatccacaggtggatgaatcacctccgactccagtcccaagtgtagacgcaggcgtttgcgcacactttccgagttggtaattacacggtccatacgcgcaagtgctccctcgtaacgccgctgaaaggcatcaaaggcaaccgttgccaggggacgcagcggcggtgcaaagcgctgcaaataacgttcgcgccagtcgtagagatagcggggtggcgtgtgacagtaataaatacgtgtgccgctgagctggtgggtaaccgccaggggcgcatacaagccgctgtagatcaccgtctgagcgtcgcgcagaaagccggtgcgcagcgtgaagcacgccagtgcctcggccactcggggtagtgagcgggtagaagtcgaacccaggcaacgtagcccctctgcgcctagctcctgctctgcagccagataacgcgcttgttcaaaaactcgcgagaccaccagttggtagtcaggcagccccttggccaagtcaatggatagccgctctgctccaccgctgacctgcaaatagtcgtagagaatgtagttgctcatcgcttactcgacccacgaaaacaggggtgccagcctgttgggccaggaggccgattgcgcatagtgctgataacgaggctcctggcctgtttcatacagcgcagcacgcaccgccacaatgaactcgtccgtcgatgaacacagcacggccgggctcttcaggttttccaattctgcccaacggctggaaactaccggcaggccagccgccaggtactcatagagtttgagtggatgaatattcgcaatcagtgaactgcacgcttccaggtgaaaggggatcagtcccacatgggcatgtcgcaggtagctggccatttgttggtgaggccgcacaccaaggaaatgcacgttgatcgacatgttggtcggcgtattggcacaggggccgatcagcacgaaactgacgtccggcatcgcacgggcacaagcctccaccatagccaggtcaacccagctgctgatatcaccaacgaatacggcaatcgggcccgcaagtgcagcgtattcatcgggcagcggcggctccccggcgaagcgctcgcaatcaacgccattgggcaggtacattacctcccgcgcgccatgctctaacgcccactgtgacaagccttgcgaggcggtaaccaccagatcggcgcgcatcattgtgctcatttcgctctgtagagcgccggcaccataaccctcaaagccggcgttgtagtcagccaggcgcatgacgcagcgcttgtagcggatctcatccagccaggcgggctgatagatgctgtccagaaacagcaagtcgacctcgccgaaaccggcatcacgcacaacctgactcacgttgggccaactcagcttgttccagtgtgaaaacaaccagggcgagcgcagaaaacgacgattggagggtgctaacaacgagaacggaacgtagtgccaaagcttgccgtcaaggtcactctgcccgccagcccggtactcctgaagacgcgtctggaataccaatgagtttggacgtagaaagttgatgattgagataggtgcagccacataggcgacttcccagccctgctccacgaactgggtagcgatggcatgactgcccacgcgcatcggcgacgtccagcagtgaatgcctacatgcagaactcgcttaaccatgaagaggctccaacaaacgcatgctccagacacaacgcgcgggtacatcacgaacacggataacttgagtctccaccttgcagccataaccgggtgagtaggcccccttttccaccgcggcctgtccagcggagatctccagcctgacctgcctgccatcagagatcagtaaccagccctgctcatcgcgcagcactcttatctgcggggccagcgggaatgccaactcgcccgcaccggcgccatactcatcgacaacctcgaagccatcgtccaggtacgccacactgcgtcgatgcgtagcggcaaacccgtcatgctcgccgcagaaaccgtcttcggtggcccggatcacgcgggtgcgcgcgactcgtgacaggctgaacaaaccggtaataccctccagccaatcattctgctcgccggatccaacactcaacgtggcatgtgcccgattggagcggaatgcgttgcgctgatccggcagcgccgtatagccataggtacccggatcgagaatgaacggcacaccgtcaaagcagacctcaaacgacaactggtcattatgcgcatggccgccattccccaattgcccgacggagccgcagcgcaacgacaaccagagcctcggacggcgatagacatacagaccgaaattgtcgaacgcacacaacgcatcgagcgcggtctctggctcgccgccctgtccttgcccaagggggcctgccagcgcctgtaagagtagtgcgtccagtgaagccggtggaggtcttggccccttgcgcaactgcgccacgcaatcgataaacaccgcatgtccatccttccagggcgcatcgtgtaacgcatcgggagtgagcttgaagaagcgcccgctatcgttgtcaccaacctgagcgactccgccgtctggtcgggtgatcccacgggaaaaatcagccattctgaccaagtgccgcagggcctcttctgaatgcagcgcgtgagccgcaggcacactgcgctgagccggcagcacgcctgggcccgaggcatccaggccgtcgtcgaggatagcggagttcagagcctgaagccgcgccgccacgcggcgcgccaatatagcgggaaacagcacgagttcagccgacagccggtggtagctggttgaagcttcgaaattgctgccatccgcctggaactgcacgaacatttccttacccaactcattggccgccagcatcaaccacgcatcagtctctgcgctgggcggcaggtaggccgcaacaaacagcaaaccagccaagttggccaggtaatggttgctgcgcaggtgggggaaccattccaggtgggtgactatatgacgaccgtgggccagtacactgcgcttgaattcgatgtcgaagtccggcgcgaaacgcatgccggcggctataaaaatatcgtgggccagcagtaggttggcgatacgaattcccacgtccatggtgcaggaccagttgacaccgaagcggggcgggttgcacgcaatgaaatccagcacctgatcctgaaactctagacgtagacgctcactcgccgcctgatctgcagccaactggtgggccgctgctgccagggccagccgtggcaaatgttgcatacgcgccagctcccagggcagcttgacgtcgacgccaagaatgtggccgtagcgaattagcgccgaaggcgtaaccggcgaccagcggtagcctgaacgcaggtcaaggtgccagtcgatggactggtagccgggcgaaatcaaacgctgcaagcgtgtcgcatggcgacggttggctggattgcttccttggattgccggcatgtcatagcggtgcccttccagtccggccgcacggaatcctgcaacgggctgtatgtcccaagcgccgagcaggtcgaagcggtgctccagtaagcgctcgctgtcggcagtcagtactgcacgccaaggctccagcatttgcgcagtgataggtggcagcagcgcttgcagaggctgctcgggaacatcgccgccaaatgtaggcaaaaaacggtcccgcgcctgcagcctgacttgcgcccagttgcgcagcgcataggcagtgacgcgacgagcaatctgcgcaggcggatggcgcagcagtcggcgaatccgggttggccaactcataaacagatgcgctcaagtgcgcatacgatccgctgcgtatggtgacgccaagtatgtttttccagcacttcctggcgtgcacgctcacccagggagcggccaaagtcaggctgctccaacacgtgagccaagccctcggccaacgcagcagcatggcccggctccactaaccaggcgctgctgccatgctgcagaacctcctggatctgaccgagtgccgatgccacgataggtcgccccatagccatgtattcgaacagttttgtgggtgaaccgaagaatggtgtgccatcaggattgggcacatgaggcgcgaccaataaatcacaacaggccaggtaacgaggtgcgtccttctgcggcacctggccagtaaatacgcattgcgaaagaacgccaagtcgcttgcaggcttccagcgttgcagcatggcgggcacccttccccatcagcaacagacgcagattctcatagtgttgcggctggctcgccagcagcagggaaaaggcctcgaccagttcctcggtgccatgccaaggtccgaaggtgccgataaaaccgatcaccgtcttgccctcaagggccagggtccgacgaaggtccgacgcatcgatgtctggatgaaaagccgtcgcatccacgccattgggattgaccagaattcgctcaacgggcacgccacgcccaatcaggtcctggtgcaggacatcgctgaccaccacgatcagatcggcggcttccaggttgagctgctcaacttgctcggacagtttcaggcgcgccactggcttaccccagtgctggctgatccagacttcggaaccgttgtactctgtcaccagcggtacattcagctccagtgccagcttggcgcctgcatagttgttcaagctatagcgctggtagataaacgaggggcgttcggcacctactaccgcgcttacctcggcgctggcggagcggctgaacaacaacgctggcaactcacggaaatcccagaaagccggggcgggcaaaagaatgcgcacggtgaggcaaggatcgacaataggattacccacggtggcgaacaccaacggcacaacacctgtgacatcgcccaagttgttgaccactccggccatgtgcgtgacagagccacccacttgggtcgagaaccataggtcggttttcaggtacaggcacggagcaccgggtttcggcgatgcggcgctgcgacgctgcgcacagccccgtagatgggccaattcacggttcacttctgcgagctcgcggggcaggcgcagcgcctcgccgagcgtagcgaacgcctgacgcagcagtgcaaggaagcccactttcagctgccgctggtgcgggtcgacgatcatcacactaccgtggctaagcagacgcagaaccaccatcaccagcagcgggcgcgggcgtagcccaagatgcgcaagcgtcagtgtcaccgatgtgtaacgcagtaagtggcggcgcattcccgggccacgcacagtggcagcaaaatcagcgtgtgaccacgtttcgacgtcggcaggcagttgcatgccctctggaggcccgccgtcacagatcagcaagtgccttaccatatcagcgcccaccccgcgcgttcggtgtgtcgatccagcggtcgtaccagcctgccaggttgtacagcacccacagattggtgccgtagtcgccacggccactgcggtgtgcctcgaacaactcgcgaatatagccggggttgaaccagccacgcttgaacagcgcgcactggttgatctcgtactctacacgacgaccgaactcacccttgagccaataggccaccggtgcgccgaagcccactttggtacggtcgatgacgcggtcgggaatcagcccgcgcacggcatccttgaacagtgatttggtgcggccgccttccagcttccagtgagcaggcatggcgtaggcggactccaccatacggtggtcaagaaaagggacgcgtgcctcaatcgaatgcgccatggtcatcttgtctacccgcatcagcagcagctcgggcagtctatagctgagttccagttgggtcatgcgccgcaattgctcgatatccccagctggcagcatggccgctgccgcagccattaccacgttactgtcggccacacgcagcaggctgtcatccagtggtccggaactgccgccaaagtcgatagcactcttgttgagcaaggcgcttttctggatttcccagaaggtcgcagcccccccaaagaagcattctttgtcactactggcacgaatcaggaagtccagcccagaggcgtgggacaaaccatcacgtcctgcttgtctggccaaccagccagccccgtggcgcatggctctggggagcatgcgatagggttgccagaagcgccggtgcaatttcagatatcgcagataaccgctgtaaccggcaaacaattcatcagccccctcacccaccagcacggccttgacctgacccgcagccaacttggagacatgataaagcggcacgcagacccaatcagccaacggctcatcctggtgataaaggatgtcggcccaggagtcttcaaacatgttccgggtcactgatacttcgtggtgctcggcgccaaagtgacgggccatatcacgggcatactcgcgctcgtccatttccggaaatccgtcgtagccgaccgaaaaggaatgcaccttgccgctcgcgtgcgccgccatgccagccagcagcgaactggaatccacgccaccggacagcaaaacacccaccgggacatcagccgccatatgctcgaccacagaggcgtcgaagctcgcacggatgctgcgcaccgcttcatcgcgggtagccggcagtgaagggggattgagcattggatgccagtagcgcttgaactccatgcggccaccgtcgacaagctgcagatagcaacctgctggcagcttctggataccacgaaacatcgtcatgggtgctggcgtgaccatgccactcaggtagtggtacatggcaattggatctatgtcccgtaccacgtcgggcacctgcaggatcgccttgatttcggaggcgaacagcaggcgaccatcgctggcgtgcaggtaaagcggcttgatgccgaccctgtcacgccccagatacaggacgcgctgcaaattatcccaaagtgcgattgcgaacatgcctcgcaggcgctgaagcaacccttcccatccccacgcccggtaaccctgcaccagcacctcggtatccgaatgtgcagtacggaaccgatgacccgcgacttcgagttcatggcgcaacgctacgtggttatagatctcaccattaaaggcaacgaccacggattgctcagcatccgacatcggctgcgtagaggcgtcgtcgagatcgacaatcgacaatcgccggtgccccagacccaggcgccgtgacgcgtcgatccacaagccagccgcgtcaggcccacggtgactcaggctgtcgcgcatgctgatcactaacgcgtcggaaaccgatcccctcccttgcgcaacaaacactccgctgattccgcacatggctcaggttctcgaaaacagcatcagaagcaatcggttcgcccctcgatccaggattcatgccaaagcacggcattgagtaccgtccagagatggaagctgtagccaccgcccgtgcccatctggtgcttgagcatgtctcggaagtagccgttgtcgaagaagccttcgcgtaccagacgcgaacgttcgaatgcggccatgcagcggcgaccgaagtcttcctgcttgaaccacgcctccatgggggcgccgaagccctgttttttgcggtagatcatgtcgtgatcgaggtaaggctccgcggcttttttcagcacatgcttgccgacgccgttacgcagtttgtggtgtggatgcagggtgcgggcgaactcgatgatgtcgtgatccagatacggtgtacgggcctcgatggagtgcgccatggtcagtttatcgacgcgcatcagcagatgctcgggaaggcgcagtttcatttccaggtagggaatcttttgcagaacatccggctgcaacagtttgcccttgatctgcgacatgtagtgttctaccactgcatggctgtcggtgctgcgatgggagtcgggcaaaagaccctcaaccgggcagtcgatctgactggaaaaaatgtccatgtttggcgtgagctgatcgcgcataccgccccaccagcacaccgcgcccccccagaacagttcctgaccagcgcgcgcgcgcttctggatttctttgtcttcagtggtcaccgctggcagaagtgccctgggttgggagacgaatcgtcgccaccaaggcatcccgccgccgggcagcgccgggttatacatgttcatcgctttatcgcgataatggtcgcaccaccagtaacccaagaagttctcgtccgcaccctctcccacctggacgacggtggtgccgttgtcacgcaccagcttcgacaagaagtacaggggaatgcagacgttgtcagcaatgggctcgtcttgcaggcgcaccatctcaggcaggaaatcctgcgcgtcgcggtgattgatcagcatctcgtgatgctcggtacgataacgcgcagccacccgctgggcatacttgaactcgttggtctcctcttcaccttcataaccaatcgagaaggtcttgatcggatcgctgcgcagctcactcataagcgccacgttaaggctggagtccacaccaccggaaagcaggacgccaaagggtacatccgagaccatgcggcgctcgatggactggcgcagcaatgacgtcatctcggccacggcctgttcatccgtacgctcgataatgtccgcagcgctgggtatgcagtcccagtacttgtgcgccttggctttaccgttcgcatcgatagtcatcagatgcccagccggcagcttgaagatgcccttgaacaaggtcagcggtgctggcgtcacgataaaggtcaggtagtgtgagaacgcggtctgatccatctgcggcgatactgcgggatggccgaacaacgcacggatctccgaagcgaacagccactcgcccgaacgggtgcgggtaaagtacagcggtttcttgccggcgcgatcgcgagccagatgcagcacgggcgcattgggattacgcgcgtcatagacggcgaaggcgaacatgccgtgaagtttctgcacacagtcgatgccccacacctcgtaggcacgcaatagcacctcggtatcggagtgatcggtgcgccaaacgaacggccgaatcgcggaaatctcacggcgtaacgcggcatggttatagatctcgccgttgaagctcagcaccaccgtggcatcttcgttcgccatcggctgcgtggcggccgtggacagatcgatgatggacagccggcgatgccccagcacacaacgctcataccgctcccgccagatccctgcgccatctggaccccgatgcagcatgcgatcacgcatattgatcaacgtccggtcatcgcacacttttgactgcgggttgaaagcgcccgtgattccacacattcgattattctcagcgttcgttgtggttgatgtcgtcttgctggcggccaaaaagccttccaagccggcgggacaaccgataagccaggttgcggctgatccgctgcaacctggccaacagaatggcgtgctcatctgctgctgccaccagcctcaggttcagttgctgtgcatggtcagcttgttcggccagcgcggcatcgcgtcggctcacctcttcttccagatgcgccaggccctgacgcagttcgacgatctcgcgttcgcgctcagcggcatgggccatttcctggttgattacctcggccatccgactcaattgctcactgcgtcgcagcaattcctgctgcgactcttgctgcagttcggtagcccgcttttgttgctcttgcgcacgaagcatttcgaggctcagcgcctccgcggcgttgccagcctctgcctggaggcgctgcacgtgctggttcagctcgatcatttgcgcagccgttccggattgcgccatgggttcggcctgggccagcagttcagcacggcgctgttgtgccatggcgcgacgatggggttctaacgcggcaccatcgcctttacgacaagcaacgacaaagagaatcggtgccgtcagcgagaaacgctcgagcaacgaaaccgccgggcctatggagttgagcagtgcgcgcgccgtaaccggcaattgctgcgattcgccacgtccaaccagcaggtcggcagctccacggtgtcggccaagcatgtaggaagcgagctccggcaggctcatcccatattgcccatccatatgcaacaactcgaaaccgcaacgctccagcaggtgacgaacctgcgcagcgccaaagaggttgatatgtcccggcgtgtcgtagccaccatgcaccacgctacaatcaccgcgctgagcacgcagcagtggtgaatcgagattaggaatggtgaaggccagcacgccattatcggccagcaacgggtggcaactcagcagcatctgcgcaggatcgaccatatgctccagtgactcccagaagctgatcagatcgaagacccccgttggcatctgggtatcatgcagtacctgcagcccggcatcttggcagatcttcaggcattcacgcgaagactcaacgcccaagccatcgaagccgtgctcacgggcggcaatcagggagttgcccaggccgcagcccatgtccaggtagcgcagcccttgccgtgggttgaacagcacactcaggcgtgtgaaatagtcattgaagcgagccaagtcggcctgctggttttcggcagacatacgcttgtgaaaggagcgctggaggactttctccgcctgcgggcaagcctggaagaaccgctcgaacaggcgagcatcgaccttcagcgggacgtgccagcagccgcactggccacactcttcatagccataaccatcataggactgaaagatcagccgctgatcgtgctccgtgccacaggccggacagccgcggcgttccaactcgactatcagcgggcggccctcacggttccaccattgcacagcctcgccccagtcggactgactcatagtgctgaagggtgtcccgatggtcatctgcggagcgctggtatcatcgtcctgcagggtggtcaggacaacgatcaggcgggcaaggtcgccagccaagtcaccggcggtctggtcaatcgacattaagtagtccgcctcgtgaaattcattcgccaattgtctccgccacgcccgcgcgcgctgcgtaaatcagcagttcacgctgggtcgggtcagccagcatggcctggtagttttccaggtcggtacccatcagttcagtcaagccatagatgctgtaattgaaggcctgcgactcaagcacgctgaagttggaggcctgcagcatccactcgatctcgtcggcggtatattcgcggtgatgcccctcaaacggcaattcggtggcgaactggctctggatcggggggtggaccgactgcccacgtgccagtttctggcggttgtagatataggccaggttgggcgtgtcgagcaccagcaggccatcggcgacaagcgagcggtgcagatcacgcagcagcaggcgcggagtatgcggcacatgctcgatcacacccatgagtaccacggcgtcatagctgctatccggctggaagtccgcgaagttctgcacccgcacgccttgctcgatcagcaatcgctggttgtcatcgaagcaagcgccgtagctgtcgtacgagtccagcgcggtcacctggtatccagcctgtgccagcatcagcgagcagttgccgaaataggcaccgaagtccagtacccgtgcacctggtggaacgtgctggcgcagcatgcgcaaggcacgaaccatgcggatcgaactgaggttgatgtagttggaccagttaaagcctttcaggcctggggaatgggtttccagaaccgagtaatccttgccgccgatgcaggccatgacctgctgcgcggcatggtcggcaatggcaaactctgttgcgaaatcacgctgtaactcgtcggtaaaattcagcttcatgctttgacctcattgatgatcaggcggcggctctcatgcaccaacacgtccagcccaatccatcgttcatcacgggcgtcgataatgttgcgtgccagccactgcgggttctccgccgcaaggttcgccatctgaatgctcctgctgcagaagtcgaacaaccacaatttcaggatgttggcggccctggctacgctgactcctcgcaggttgaacgcgccgacacacgcatcggtagcagcgtgttggcgccagcgaacttaccgccattacctttgatgttgaattcaacacctcggttcaaagcgaaatagacatcatcattgatagagaagaagcggccatcattgtcctcgaagtaaccggggcgaaccgcgaaaagcgtcagggtaaaggtccccagtcccagcctcaagcgagaacagtcaaaactgacctctccttccccatcggcgatgctgatttcgcccgcgctaaggcgagcgacatcggtaaccccgtcgcggtggatcgcgatgaggaactcaaccggtagcggcccggtacccggctcgacccgatacttggcgcgcacacagatgggctcgccggcatcgaagacgaaccgactgtcaccctccgcgccgcacagttcgactccctcgagccaaatacggcctgaaccatgtacgtcggactgtggagccaactgggacggcggtgcctgcatttcgcttcgactagtcggccatgtggacagctccccgaggagttgggcggcaacaagttccagctcggcgcgcatcgcgcatttatccttgaaccagagctcgcacaacagcgtattgtcttcgctggcggagtagtcgacttcgactctcagcgcgccttcgccagcctgctgaatctgctgctggctcaggtccaacaccaatcggcagcgcttgaccgcaccaccgtccgccaggatacgcagcccgctgcgcccggctaccgactcaaaaccagaggacggctggataagcgtacaaccttcctgcatggggtactcattgagcacctgctcaccatcaagcacacgcaccgtgcgcaccagtagctgcccacgcaagggcgcctggtcggccgtagacaattccagaacacacaggccggcctggcgcgtagccaaggccttggcgcgcaaacgtgcttcttcctggaggcgtaccgagtgttcataggcgcggattacttcatcgctacgcccatccatcaacacgctgccgcggtccatccagatcatgcggttacacaatttggatgccgaatacacatcatgggacaccagcagcaccgtggtgccgctctcctcagtcatttcccggatgcgctcaaagctcttgttggcgaagtaggcatcgcctacgccaagaatctcgtcgagaaccagcagctcaggggaaattgcggtcgaggtggcgaacatcaagcgcgccatcatgccgctggaataggtcttgaccggctgatcgatatattcctcaagctcggagaaggtgatgatttcctcaaccttgtgattggctttatccccagtcacagccaggtgcgccaggtaggccagcgcattctcacgacctgtgaaatcgggatggaaccccgtaccgatctgcaacagggcatgtgctccctggctcacctcgaaaaggcccacagtaggttgcgtcacccccgtgatcagtcgcagcagcgtgctcttgcccgcgccattgcgcccgataaaggccactttttcacccttgcggatggtcaggttgacgtcgcggatagcccagtgctcttgataggctccctcacggcgtagcatcccaatcatgtcgaggaaccggtagtgcggcttcgcataaagcttgtacagcttggacaggccttcggcgtggatgattacatcactcatagtccaccagcatgttcttgaagcgtctgaagaaggcacagcccagggcgaaggtgaccacgcagatcagtgcgtaccagcccaacacctccagattcacaggatgattagccagcagcacggtgcggaaggcctctgtcatgtagtaaaccggattgaggtagatcatggcctggaagccacctggcaccatttccggcttgaagccgatgggcgagataaacatcagcagcagcaaactcaggttgacgaagttagcgacgtcgggcagcgcaaccaccactgccgagaggacgaatacacagcccagcaggaacaaaacctgtagagcgatgaccacgggcagcagcaggaagcgccagctcatgttttcgtcacccagcaccagcaacgccacgatcaggatgctgaccacttggccggtcaacgcgaccagtaccgtgcgcaccgggatcaggtcaaccggcagcatcacgttcttgaccagatgcatattctgccgcagggaaaccgctccgctgttgagcgcctcgctcatgccgatataaggcaccagcccggcaaaaacatagagcgtgtagtcgaactcgctgagccctgggaaacgcattttgaacactaccagatagacgaacaggtagatgctcagcaacaacagagggttgatcaccagccatgccttgccgaaggccgaccccgaatagcgcttcgccagttccacgcgggttacggctgagagcacctggcgataggcccacatcatcgataacacacgccccgccgagcgcccgattcgcagaatcatcgcttgaatccccggaacagaagctccaccacgggttttctcagaacccccaccatccgagcggccaagcgccgcacaggatgacgatctgactgttgattgttactcacatactggacaatgctggcgtccgccagggtccgatcgaagaatggcccctgataaccgtaagccatcgggcagcgctggcagggtggcaacggcgtgtcagagttcaccgtgcggcggaattcacgcattttctcgccgttccaaatcgactggaaatcctgctcgaagatattgcccagcgcgtaatgctcctggctcggcccggtggtgatgcagcacacatccatgcggccatcgacggtgaagttgttgatatcggtccacggcttctggcagtagaaacgtaccttttccgggacttgcttgaccttgatgagcttggctttagtcggcgtgaccgtctgagcggaggtcgcctgcggctctccggcgacggcttccatctcgatcagttccgtgccttcacgctcgcgatccggggtatcttccagagcatcgccccaatcaatacgagccttcatcccctcatcgccgcgggagaacagcaccacctgcaaacgatggttttcagcggtatcgatgatcaagtcctgcgcatggctgccgggaccgaagctgaactggtgcgtccacttctggaagtcctcgctgagtacaccgatggccaacttacctgtttcgacgtcaacctttaccgggaagaccaagcggctgccgggtgcgcaagggttggagtaggacttgatcagatagcgtccattgaggttcggtcccgccacgatatccagtaaatgaccttgccaacgggcccgcacaccggggctatcgatctgccagcggcgcggaaacggcaacttgaacgccttgcggataccgaccccgggacgcatgacgcgaatgaagtcgatgtcggctacaaagcccgccgcaccggagaacaccaaggaaacctggagttcttcatccgtctcgaaggtcagagcaacctcctgttcatcctcgccggcctggatcacctggctggtcagaacatgtccagaacccgtgagcaccgagactaaaagaggggtgccctcaagtttcacgctagcccggaacagcagttgctgaccaggctccacgggtatgagcgcgctgcgccacgtgtagtcgccctcgccgccctcggggcagcgcaacaccgcacggttgagattccaggagacactcatggccgaatcgccgatatgccaatcatctcgacgcggtgccagcaggcgcccctcaaaaccggggggcatgatcaccctgtccacggggtcaggccggaccgagcggaaggtggccgggtcaatgcggatgtcgcaggagttgcgcgtgtagggaatctggcgccgcggcacgtcttccaggtattcccgtgcggcatcaagtgcatcgttgacctgggattcatacggcacgatgtcgcgcaggtcttctactgctcccaggtctgccccgagctcagacaatggccgaatcatgatgacgttgacgcgcagatcgtattcggcgaattgcaggaactgctgcagttcgtgaacgttggtggcatgcaccacgaacgacacgaacaaactgggggtgtcgctccaggcacgctggtcgacaatggcgcgaatactgttggtgacgcgatcgaactccttgatcttcatcacttcgcggtgggtctgggcggtagctgcattgagcgagaaggtgattgactgcaagctcagcagatgggggatctgctccggctcgatcaaagcgccgttagtgatcaggtacgacgaagcacctttcttctgcagcgtgaccaacagggagttgaactctcggtacagggtcggctccccgttgccttccacgccatacatgtaggcggtattgagtgtcggcgcgataaagcgctggaccttatcgaatggcaactgcttcttgatgatgccggtgcgtttaatcgtcaccgaacagaactcgcagagggcgttgcattgcccggtcgggcatagcgcaaggtacatcggcaggctaagactctcttcgcgccccagacgcatctccatgccggccacaaaggcattgaacaaccgagagctcttacagcgtcggtggacaaagcgcttgagaggtccccagtgcggcaggtaggtatcgacgtcgagaatactgtcgtcggccacatagggcgccgccaggatttcgaggccacccagcgtgaatgtgctgcctcggggataagcaccgaagtaattgaccagtgccaggcgataactgtcctgggcagcgggtgcataggaaaatgccagacgatgttcacccgtctgttccactgcccgttggcgcagccagtggtcaggatcaccggcactgccctggttctcagacttgatcaacaccagagccaagggagcggcatgatcgacatcgacctgcagttcaaaggtgtagagctgtcctttatgcaactgaaactcggaggacagcaactgggtattgagcggaccttcgtcgcagacccagtagccttctccctgagcctccaaaggctgcgcacaaaggttttgccaggagacatccggggcgatctggggttcgataaatcccgtacgcttcttgcgcccggattcacgcccaacattttcggtcacttcgacgagaggaatagtcttcatacatagagtccttcaggctcagcgttccatagcgcatttgcgctttcgcgagcatgtacagaggaagggccgcttggcgcggtaccgacgaatatcgcgcggcacaaagtggatgactgcgccacaatggctacggtgcgcaaacgcaccccatagccacttgaataccaagcctcttcaacgctccagatcagtgaggggggtgcctcgaatacggcaccgccatcggcgtaactcagtaccgcccggttggcctccaccgtaacctgcacactggggtgaaccaggaaatgccagcgcaatagatggttttgcgcattgcccagacgatcctcgacgatcaacgcaccgctgtcggccaggcagacccggcgctcatgcaagagctccggggccaggcgctggtaggacgaatgacgcccgatgataccgatgctgccgtgaccttgtttgggcatatcccactcaggttcgccttgctgcacgaggcgaaacaatgctttgggatccatcccgtgctgttcctggccatccacttgtaccgtgttgtgatgggcggtggagcggaaccagtttcgtgcgtccgggtcctgggtataggtgtaactgcctccatcgacgaacagcggctgatcgccgatggcccattcgatggcgagctggtcgttatgtttgtggttaccgatgccgaaggtaccacacaccgagttgctcattgcgacatagtgaccggcctgacgcagcactgcaacgccggcctgctcgaacaacattaccggtgtgggagccggcagttccgtgattgccgtcgccggatcccaagggtcgcgccagaacagcgcctcggcctgcccggctgcgtccagaggtttatcggatgtccgacagccaagcacaaccgagcctgcggccagcaagtggtccatatgctcctgctcggcttcccaacggtcgtaggccgagaagatatgcgcgcggccattatcagcgtcaccgatctgcggcagccggccgctgtcctggcgcaaggcactgacgaaatgcagcgctttgaccaagcgctcgcgatactcgcaagagaacggctgcctgtgatgctgggacagagcataggccgacaagaacatctcggtcacaaggcgatggtagggcacgctcgactcaaagccgccaccgtcttccagcaattgcagacgcacctgctgctcaagccccgcctccgcgataccacgccacacgcagccggcatccagcccggggaagttcatggccaaccagtacaggccgaacaggttcgccaggccatggttggaaacgatgatgcgcccttccagggtgccgaactccaggttggccgtgatatgccggccgtgttgcaccaggcttttgaggaagtgtctccaccagcgccggtctagctcgcctgagttctggaaaaaggacaggcccgcttgccaactgaccaaacgcagggccacgtccatcgggcaggcccaatgaacgccgagacccggtttgttgcgcgcgataaagtctgcaatcgtgcgggcgtaacagcgtgcgtatttttcatcaccggtcagccagtacgcctggcccagtgccggaaaatgctggcaccgcgtaagctcccaaggcccctttacatcagccgtgccacggcgcatgacgaaaggcgaccagcgccattggctgaataccgcgccatagcgttcgccggaaatagggtcgcgattccaatcgatatggtgccctgctccgcgcttaccccggcgcatgtccactgtcccgctgcccagcaagtcgaactcgccgcgtaccagccggtcagcctgggcaacgatgcgctcggcctcaccgggtatagcccggagttgctgcaccaccgaatcacggtcggacggcaggaagttacgcctgccgaaatcaccgcgacgctgacgaataaggtaagcgtagaaaccctgccagccatttcggcgcagtattgcggtcatctcgccgtccgcaggttggcgtgagaacaggtaacgcccccactcccagcagcgctcttgaatagattcaagcccgtgcaaccaggctttcaaacgctcacggtggggtgcagcgaccaagcgcaggcgatgcaaaagcgtgcgacgggcgaaacgaattcctctgccgatcacgatgtcaccttcagtgcggccgaacgctgcacagcgtggtgcaggattttgtgtacatgcttcttccaggtgtaattgtcgagcagagcctgacgcgcattggcccccagtgtcgaccacaagtccgggcgagcagccaggccggccacggcattgacgaagtcttcggtgtcacccggcttgcacagtatcgcgcgctggccgtcgagctggtcgaggcgggcctctgccaggtcctgggtgtcgaacgacggggtaagcacatcgccgatctgctccagcctactggctacaatagccccgccgagcgccatgtactcgaacaacttagtgggcgagccgaagaacttgctgtcaaccatgtggcggttgtgcggcgagatcaggatatcgctacaggacagcagcctggcagcgtcggtctgcgcaactgtacccggcataaagactcgatcctggaggtggtgacgcttgatggcatcgtccaccagatgacgaaagtttccgtcaccgataagcaggaaacgcaggttcgggtcgcgctcacacaataggggcagtgcctcggccagaacatcgattccgtgccagccgccgaaggtgccgataaaaccgaccacgcagttatcgggttcccaaccgaggcccacgcgcatctcgtgcttgagcgggctgtcgatgggcgcgtagtgatcgggcgagcagccattggggttgaagaggatcttctctggcgggatgccttgctggatcaagccatccttgatcacctgcgaaatggccacgatggtcgtggcctgggcgaaagccgcctgctcggccttggcgaaggtcgtttccaactcataaccacgctcatcgaagctgcgcttcatggagatttcagagccgttgtactcgaggatgtagggaatccccagttcacggctcagtcgcgcgcctacgtagctgcccaggatggaccgctcgtagatgtaggccggtttcagttcggccattcggtcacgcagccatcggtagaaaaagcgcgaggccttcagtacgtcgatctcgttacaggtcgaggacggcgtatccattatcacctgctcgatgcccatcgtatcgagcaggtcgaaacggttggccataaagcacactaggttctcagtacattcggccaactcctgagccacatagcaggtgtgtccgtagctaccaccggcggtaatattgacccagtagtcggtgcgcaggtacacaccggtgccggggatcttgttgtctgcgctgggtacaccgctgacggccagtggataaggcgaggcctcggcgatctgccgttcgatctcagcactgatggacgactccgagtcgcccagcagacgcgccaggtccgcaggcatccactcgaccaaaacggcgctcacatccagcgatgaggggccgccctgagcattactgaacaccagggtcaaactctcggagccacctgggtcgatcacaaagcgctcggtgaagtgccctttggaaagggggtagttgccaagccaggtggactcgtcggcattcaggcagccgaccgccatggcaccggtcgtcagctcaccggaaatcgataacaccgccatctgacctggccgagccgcaatcaccctcgaacgcagttgataaccccagtcggaatcatcgctttccagatggaagccttcctctcgcagggtaaaggcacgggcagccagcgcgctccatccgaactgttgcaagcgctctatgcgggccacgcgcacggcgtgcagagcacgagaggcataacgccgcaggacgcgagccacacgtagcggcaactgtatgattggcagattgcgcacgactattattctcccgaaaacgccattttgtgagtcttgaataccttgaccagcgcttcccgcgtcatcggattggcaccgataaaccagatcacgccttttttaaacaaatccagccacatatcccagccccagtcttgctgcctgagcatcaagcgtacctggccgaccctgcagcacagttgccgcccgcccacaggctcgcagtacccgctcgcgtaatctctggagacaggcccatggccggaatctcctgcctgatgcgcgtcatcatctgcgtatcggcggtgcactgcggacaggacgtcaggcttatctcttcaatctggtaggcgtagggttgatcggcatagatgagtaattcgacgcgggagccggccgcaaccgtgatggataaggtgccatcgggcatgcggaagtaggtaggcacaccagtgtcgatggtcaaccgcccgctcacgggctgtttcccttgctggcgccccaccattcgcagtttttggggcccctgctgcgtggcatcgaccaccagccctagccccgcggggttgagattgccgctgatctgcagcattccacgatgcagcgtaaggccgggtgcctggtaaggctgcacaatcaaaccattgtcggggccgaagaactggtcgagggcaacctgcccatgctcatcaaacagggttgagcgcgtcactgccagcgttgccaggccgaccacagccaaggcaataatgcccggcagcagcggacgcagcggacgcagcggacgcaagtcaatagcgggcagtcgtggcatgcgccaagggccttcgagtactcccaagcgcgagcgcagacccagacacggcgactcgacccatgcccaggaggccgcggccaggataaaggcgaacagcaacgacgcccacgccatccacgcttcaccggtgataccagcactgtaaagcgccagcggcaacggcatatggaacagatagagaccgtaagacaggtcacgtccacgcatccatgtcgacaactgcggccaagagtgagcaaacgccagcacaaacccagccagcagcatggcacgcagcgcaatcactggatcaggaactcggtagtcgagcgtagtagcgccggttttcacgtagtaagcaaggttgatcgaagcaaacaccagcatccaccaagacgcgcgcccaacgaaaaaaaaccgcagccgctgccaatagttcgccaccgtggccccggccaggaacatccagaagtaaggtgctgggtttgaaaggagcatgccggtcaggttggaactgggatcgctgcgcagcattgggccaaacttcatagcggccgctaaggataaggcgaagcacagcacgataagcaaaggcgtcaaccgcaaacgcgccagagtcttggagaaaaccagcggcaccagtagatagaagcccaactcaaccggaattgtccacagcacatcgctggggtagccgttgtacaggccgtcccaggtaaaggggccgtagttggtgaccaggttggcccagaagttggagcctaaaaacatcgccgacagcagccacttccagaacatcggatccaccagcgtcgccagggcaaagccgccggtgcaggccatcagcacgatcaccaacagatactgcaaccacagcgctgggtaaatacgcagggcacgactaccgaaataggtcaacagcccgcgctgccgattgacataggagcgcgtgatcagaaatccgcttaccacgaagaataccggcactcccggaaagcacttgagcaacccctccacctcacgcggcaacggcacctgcagccaccaaaagatgtgtgaaaatgccacctgcaaggccgcgagtaagcggatcagatcgaagttattgcgctgctccttagcgtccatgcctgtcagtcgtccacctgaacgaccgcgagaccagtgagcagctcctcgacccgtagcgccacggcagtggtctcgacgatctcgtcgaagggaatcggagccgggcccccgcttgccagcgcttgcgccagcagcttcatctgcgtggcctggcctttatcggcctcggtagcagaccagagcacctcgccggtgctggccttgatcagttgcttgaagtcgtcaacgacataagcctcgccatcacagaacacttcgatacgctccttgggcagtccctgcttgggaccgagcgccgtatagaacagattacccatgctgccgtcggcatagccgatcgtggcgctgaagttgtcagaggccagataaggcagcccgcccgggttgatgccagtggcactgatcgacgtgacgggcgcaccggacagcgaacggaacacatcgtacatatggcaggcttcgccaatattacgtccgccaccctgctcagtctggatccagtggtccagcggaatatagccaccgttaaggcggtagttgatcgccaagggggccgtgcgcccggaaagagcttcacgcagggcctggagggctggcgaaaagcgacggttgaaacccaccataagcaacggtggatcgaccagggcgtcatggcactgcgtcagttcgtcaagttcgtcccaggtgatcgcaatcggtttctcgacgaacacatgtttgcccgccttgagccctgcaatggcctgagccgcatgttcgcaatggcgcgtggcgatcaccagcatatggacatcaggatcgtcgatggcagcgctcagattggaggagaagacgccgagccggcgttcgcgtacgaagttgccaccacgcaccgcatcgcggctgaccacaccgcgtagaaaaatattgtccagacggtcgagcatgggcaccaacatcgactggccatacgcgccagcgcctaccaacaggtagttgatcttgcccacctgcgggctgcgggcaccgcgcagttggatacgctcggcctcggcaggttccaccatggcaacatccgcccgggtgtaatcgagcagcacgccaataggcggttctagactgtttgccaaggtcttgtagagcgccggagcgtcacccaccggcgctacgatatccacaagcgattccacatccaggcgcctggctgcgatcagctccatgtagctctgcatattacgattgagcgtccagcgcacataagaaatagggtaatcgttgcccttttcctcataattcgcgtcataccgcccaggtccgtaggacgtgctcatcagcaggtcgatttccttgcgatagaaatgcgcacgctgcacgttgaggccaacatcaccgacgatgaccaccacaccgcgtcggcgagtgatctccatagcggtattgatcacgctgtcggacttggtcgccgcagtgatcaaggtgcggtcacaacccagcccggcagtgatgtcgcgaaccagacgagggaactccgcggcattcgaagtaccgtgctccatgcccagcccatgggcacgttgcacacgcttggggtcgagatcgaatccaatcacctgacaacccgcagcgcgcagcaattgcacggtcagcagaccgagcagacccagtccgaccaccgcgattttttcacccagatcaggctgggcgcgacgtacaccctgcattgcaatcgtgccgatggtggcagacgcagcccagcgcatatcgcagccatccggaaccaggcaaaccaaattgcgcggtaccaacacataatcggcatggttggcacgcccggcaccaccacaagcgacacggtcgccgaccttcagtccctgcacaccagcgccaagcgccaccacgacccccgccgccgagtagcccaggttccagccggtttcatccatttcattgtgcggatcaccccctgggttaggcgctaccaacactacatgcagccgttcgaaatcagccttggtaacgccgccttgggcattggagatcaccagcttagcggcctcctcgccctgtgggtcgaagatcaatcgatcatccagcgcgccgggcgtcagggtgcggttccccagccatttgttgccactctcgtcgaggataccaatggcaagcttgccgctgtcgatggaaccgcgaagctccactgcaacctgatagcccacaggaatccgaaagactgcggtgtgtgcctggtactgccagtcagaatcatccgtcaccagcgacaagcgcgcattgtcgataacaaactcgctggcagcatcacgctgccaagccaacgcacccaactcttgatccggaagacgcagcttgggcgactctgggatcagccgggcaatctgattcttggcgatacgtttgagccttgaggcagccaggcgagggtccgcgatggctttgaccagataacgaccagcacggctggtgatctcccgagcctgatccaggcctgtcgacgcctcgcttgaggctgccggacgcaggccggccacttcagtgcccacgctaatcattgaatactggacctgaaccaggaccgcgccgggctcaacgccaggtgcaggcatccgtgcaatgcgtacgcgatcacttgccaaaaggacttgcctcataactctctcttatcctgagcacctgcatgaacatattcactgataccgacactgcccaaggctattcatgccaagaccttcatatcagcatcaggactgcagttgcttttctatcgtcaaagcaagccgcgttgtcgcaagctggctcatgatgtttttttcgtccagcgccccggtattaatggcatccaccagcgccaagagctcttcatgctgacctttttgcggcgcaactgatgcccaatgctttgaactgtcgcccgccacggtgaccgcccggtaatcatccaggctcaaaaccttcccatccgtgtagatatccatgcgctctttcggatggctgggtgaacccagagaagtatataaaagggtggccacggacccgtcgctgtagcgaatggtcgcgctgaagttttcgttgcgtcgaatgccgccggcgctgccgccaatagcagtggcctctaccattaccggctcggcatctgtcagaaaggcaaacaggtcatagatatggcaggcctcaccgatgtttcgtcctcccccttcaggcccatgcacccaatgatccggcggcaggtaaccggcattcatccggtaggaaatcatcagcggcgcgacacgttctttcagcatcgctttaatacaggcaataccgggggcgtaacgacgattaaaacccgtcatcagcaacggctttggcccgacattggtaccgctgtagaacgcttcaacggcatccaactcttcttcatgcagcgccaagggtttctcaaccagcacgtgcttgccagcttccagcgcctccttgaccagcgctgcatgcagatgatgacgcgtggcaatcaacacgaggtccacatccgggtcggccagagcctcacggtaatcggtgccgacaaagctggcaccaaactgcatggccgcggcctttgcgctactaccagtgcggctgaccacccagcgtatctcataacgctcgcgcaatttgatcagattgggcagatgcacgccctgggcaaacccaccggcaccaatcacggcaacccgtaccatgccctggttagcgacgggcgggcgcagcatcaggctccgggtctgctccaaatgcccgtcattcgggtaacgcaacagggccaacagcggccgatcatttccttgaaccaggcgcacgtacagcgcctcggcgtccgccagatcgaccacctcaggaagcaacgcctgtaagtccaccgcgccctgtgccagcagctcaagaaaggccgccatattgcggttttccgtccagcgcacgtaggcctgcggatagtcctgaccaccttcttcgtagtgagggtcgtagcgccccggtccgtaggaggttgaaataaagaaatcgagttccttgcggtagaagtcttcgcgcttgatatccagtccgacatcgcccaccagcacaacacggcctttcttgcggcaagcacgcatggctaagctgatcagctcactactggcggaggccgccgtaacgaccaccgcgtccgcgccgaggccttcggtcatccaggtcacccgggcgacctgatcgtcctgagtgggattgatgcccagatccataccgcactgtctcgcaatatccagacggcgcacgtccggatcaaccccgataacacggcagccattggccttgaacagctgcaccgccagttgcccgagcacacccaatccaaccacgacgatagtctcaccgagcgtcggtgctgttctgcgcacaccttgcatggcaatagcgcctagagtcaccgtggcggcttgttggggagccagtccctgcggcaccagcacggccagattgaccgggacgttgatgatttctgcgtgattagcaataccagcaccggcgcaggcaacccgatcgccgaccttgaagccgtcgacctgctcgcccaccgcaaccaccaccccggcggccgaatagcccgtcggctgccccgccgccaaagtgccgcgtatctgcgcaacggtgcgcgaaagcccctgctcgcggaccatatcgaaggcacgcttgattttttcaggatgcttcaaagcgcgcttatacagcggctctgcggccgacaccacgctggcggcttctgtccccacacttacgcaggagaactctacgcgcacaagaatgtgccggctcccaaccaagggagcaggaacctcttccagtcgtgcagcaccctgccttagcagcagttgcttcaacgccaagctccccgggtatcgattatcaccttgccttcaagcaacgtgcgatcaatggtcaggaactgcttgtggttgaccagcagcagaacgatgtctgcatcagcgatggcatcttcggcctgcataaactcgacgttgcggtacttgctcagcgccgccggcaacgactcgacatggggttcgacaacgcagataaggccatcgatctcatgggccagatgggcagcaatttccaacgcagggctttctcgcaggtcatcaatgtccggtttgaaagacaacccgaggcaggcgaccttgggattgaccaagtccttggcagccgccttgacttgctctatcacccagcgcggcttgccgtcgttgaccaagcgcgccgtacggataagctttgcaaggtctggcgtctgctcgacgataaaccaggggtccaccgcaatgcagtgcccgcctacaccggggccaggctggagaatgttaacccgtggatggcagttggctaattcgatcagttcccacacatcgatgcgctgccgatcacaaatcaacgacagttcgttggcaaaggcgatattgacgtcacgaaaggcattttcagtcagcttaaccatttcagcggtgcgtgcactggtggtcaggcaattgccttcgacgaagatccggtaaaaggcggcagcctgctccgcgcacttgggcgtcatgccgccgatgatgcggtcattgctcaccagctcatgaatgatccgacccggcagaacgcgctcggggcagtaggcgaggcggatatccgacttctcactcgcatcgcagggaaaactcaggtccggccgcctagcccgcagccactgctctagcttctcggtcgtacccactggcgacgtggactccagaatcaccaaatcgccttttttcaggactggcgcgatatttttcgcggccgcttcgatatagctgaggtcggcctggtaatcatccttgaacggtgtaggcaccgccaccataaatatgtcggcagattccggttgcagcgaggcgcggaagcgtcccgacgccaccgcaccggaaagcagcacatccagttctgcctcaacgatatgaatcttgcccgagttcaatgtcgccacaacggacggattgacatcgacgcccagaacctcacatccacgactggcaataagggccgccgttggcaacccgatgtaccccagtcctatcattgacacacgcttgtattggatcatcccaatattccctgcacgatccgcttggcggccaagccgtccccataagggtttccggcattagccatggtttggtactcagtttcgctatcgagcaggcgcaacgtctcgaatacgatttttccggtatccgtgccaaccagccggacagccccgacatccagcccctcagggcgctcagtggtgtcgcgcatcagcagcaccggcttgccgagcgagggtgcctcctcctggatgccgcccgagtcagtgagaatcaggtggcagcgcttcatcagatagacaaagggcaggtagtccagtggcgcaattagatgtacacgtgggcagtcgccgaggatacggccgaccggctcttgcacattcgggttaaggtgtactggatagaccacttccacatcattctggccagccagctcgcgcagtgctaagcaaatgttctcgaacccttggccgaagctttcgcggcgatggccggtgaccaggatcaacttgcgaccagcgtcgagaaaactgaattgctcctcgaactgcttggtcagagcatcgtccatctcaatgcgctgcacgacgtcgagcaaggcgtcgactacagtattaccggtgacgcatatgctggtatcggcaatgccttcgcgcagaaggttagctcgcgccgcctcggtgggggcgaaatgatgtatggcaattgtgctggtcaaacgccggttgatttcctcgggccacggagaatatatgtttcccgtacgcaggcccgcctctacatgacccactgggacacgctggtaataagctgccagactgacggcaaaggtagtggcggtatcaccatgcaccaaaacaagatcaggcttctcagcttcgagtaccggcccgatgccatgcatgattcgcgtggtgatatcggtcaagctctgccctggacgcatgatgtcgaggtcgtgatctggcactataccgaacacacccaatacttgatccagcatctctcgttgctgggcagtgacgcacacgcgacagtcgatcaaggcctcttcctgaagccgctttacgacaggagccattttgatggcttctggtcgtgtgccaaaaacacacagtatcttcatccccccaaaatccttctgaagtttgaaaaagcggtggatatcccgcccatttgcgttatttcttctaacccgtatgacgggagaagcggactcaactacagataagcatattactgaatagtcgcgtcttttctatgaaaaatatcaaaatacttaaaaacttcatgaaacacccctctcacacgagccgaacggttaagccccgatgaaaaaatgtcccacgccgatgcctagcatgcccgcgaacgttagcagacctgcctcgtacacatccgatcgacttgggccagttcactatctgaatagctttgagcacccgaaaattggagatggtcgtccagcgtacctgttgatgcccatgttgcgggttcaactgatgcagaactgtttcggttgcagcgagccaacgatggaaaaagcagtcaaagaaaccaccactctatactagaagagttgtccgggctgcacttggatcgtattccagacggaacgatcattcccattttccggcgcttgttggaaacacacaagttttagagcggacctgacaattaatcaatggccatctggacgaccgaagctttctgctttaccaaggcacgacggttaatgtaataatcattaattcaattaattcaattaattcaaaaaaacaagaaaaagaacacactccccagcaatacaaccttactgtaggatacgctttatttgtatttttatagaaacttaaccattgaaaaatacttttaaaaacagattaaaacataaactattgacgattgtataaatcctcaaatcgaacgatatcatcttcacccaaataagagccagattgcacttcaatgatttcaagaggaatgacaccagggttttccagcgtatgagtttgccctactggaatataagttgattgattctccgtcaccaagtaggttttatcaccattagtgactttcgccgtaccactgaccacgacccaatgctcagctcgatgatgatgcatttgcaatgacagttttgcgccagaattaacagtaattctttttacttgataacgtctgccgctatgaatcgaatcgtagaccccccaagggcgacagacttctctattatcaacagattcgccacggccatcgtcttttagtttatcgacgattttccttacattctgcacctgacttttatgcgcaaccagaactgcatctttagtttccacaattaccaggtcgtttacccctaacgtgctgaccaaacggctttgtgagtagacaaatgtattatttgtctgctcaatcaaaacatcgccatgacaaacatttcccagaatatctttatctccaatctcccatagcgacgcccaagacccgatgtcgctccatcctgcgtcaagagtaactacaactgcatcaacggttttctccataatcgcacaatcgatagactctgcagagcaacttgcaaaagcttcacgtccaacacgagtaaaatgcatatcctgctcactgtctgcgagtgcgctacggcaagatgccaagatatctgggcgaaatttctccaactcttccagataacggcttgcacggaacataaatataccgctattccatagataattaccgctcgcaaaataggaacatgcagtttcttcatccggcttttctacaaatcgggccacgttgaaggtgtccacactcagactatcacccctctcgatgtatccgtagcctgtttctgcctgcgtcggaacaactccaaaagtaacgagttttccatcaagtgccaatggcaatgcctttcgtatagccgaatggaacgcagcagtattttttatcaggtggtccgcggccagaatgagcaataccggctcctgctcttcacgagaggcctgcagagcagccaaggccactgcgggagctgtgttgcggcccactggctcaagcaaaatattggtatttcccaacccgagacgcctaagttgctccgcggcgagaaagcgatgctcttcgttgcagataaggcgcggtgatgctaagtcaagaccatccagacgcttgatagtcgcctgtagcatggataactctccatcggccaggcaaagaaactgcttaggattgagctgacgagaaagcggccaaaggcgagagccagaacctccagccataattacaggtattaacatttaatcgtcccttgaattcaatgcgttttcgaactggctaaaggctatatagcgataccaccttttttgccaccgactcataattttagaaacttccttcattcacctgcccactcatatcagaacagtaacccgcagaaagctttctgtgcagcttgcccatagcctctttcaaagagtccgtatcaatacgaaaaagtagattacctagtctccgcagacctgagcataaaccggatcctggcagattattggacaccacgaatactaccttcataaacgaaagccccatccggccaagcagtcagagcacagcaacacaggttcgcattgttagcctgaagtgcacgccgccgtcaattttggcgagcggctgcgcatcgatatctcgatgcccgatccgccgcaggcgttttggtagacatatagtggccgttcaacttggccgattggatccaactcttcagagccgccgcactttgaatcgcccggatcctctaggcagcttgcaagctcattcagcgagatcgcaagccaaaatcgaacatatgatggaagcaatgaaaaagaaaaggcccctgaaatcaggggccttaggcagtcagtgtgtcaaactctattgcctgaaaccacgtcgagcctccaggatacggcgcattactccaccgtcaccgacttcgccaggttacgcggctggtccacatcggtgcctttaagcacggccacgtagtacgacagcaattgaagcgggatggtgtagagaatcggcgacagggtgtcgtggatatgcggcatgttgatgacatgggtgccttcaccgttggtcatgccggctttttcgtcggcgaacaccaccagttggccgccacgggcgcggacttcctgcaggttggacttgagcttctccagcagttcgttgttcggcgccacggtgaccacgggcatgtcgtcatccaccagggccaatgggccgtgtttgagttcgccggccgggtaggcttcggcgtggatgtacgagatttccttgagcttgagcgagccctccatcgccaccgggtattgcgcaccacggccgaggaacagggtgtggttcttgtcggcgaacagttcggcgactttttccacggtgctgtccatggccagggcttcgcccaggcgggtcggcagacggcgcagttcttcgaccagggtggcttcgacgccttcggcgagggtgccgcgaacctggccaagggacagggtcagcaacagcaggccaaccagctgggtggtgaaggctttggtggacgccacgccgatttcgcgaccggcctgggtcagcagggtcaggtcggactcacgcaccagcgaactgatgctgacgttgcagatggccaggctggcgaggaagcccagttctttggcgttgcgcagcgcggccagggtgtcggcggtttcaccggactgggagatagtcacgaacagtgtgtcgggctgcaccaccactttgcgatagcggaactcgctggcgacttccacctgacaggggatgccagccagttcttcgagccagtaacgtgcaaccatgccggcgtggtagctggtgccgcaggcgacgatctgcacgttgcgcactttggcgaacaattcggcagcttgtgggccgaaggcgttgaccagcacctggttctggctcaggcgaccttcgagggtacgctgcaccacggaaggctgttcgtggatttccttgagcatgaagtggcggtattcacccttgtcggcggcttcggcaccgtcgcggtattgcacggcttcgcgctcgacggattgaccgttgacgtcccagatctgcacgctttcacggcggatgtcagcaatatcgccttcttccaggtacatgaagcggtcggtgacctggcgcagggccagttggtcggaggcgaggaagttctcgcccaggcccaggccgatcaccaacgggctgccactgcgggcggcaaccacgcggtcgggctggctggcgctgaccacggccaggccataggcgccgtgcagttccttgaccgtggctttgagcgcaacagtcaggtcgcccaggtctttgagcttgtggttgagcaggtgggcgatgacttcggtgtcggtgtccgaggtaaatacgtagcccaggcccttgagttgttcgcgcaatacttcgtggttttcgatgatgccgttgtgcaccaccgcgagatcgccggagaagtgtgggtgggcgttgcgctcgcacggcgcaccgtgggtggcccaacgggtgtgggcaatccctaagcgccctaccagcggctcgccggcaagggcctgctccaactcgctgaccttacccgggcggcgcatgcgctcaagcttgccggcgttagtgaaaacggccacaccggcgctgtcgtagccccggtattccaggcgcttgaggccttcaagcaggatgggggtgatgttgcgttcagcgactgcgcctacgatgccacacatggtgtttctcctagatgattgccgcgcatatcagcgtaatgccgcgggcttggatctggtcgcgggcctcgagcggcaggcgatcatcggtgataagggtatggacgctgctccagggcagttccaggttgggaatcttgcggccgatcttgtcggattcgaccatcaccaccacttcccgggcgacctcggccatgacgcggctcagccccagcagttcgttgaaagtggtggtgccgcgctccaggtcgatgccatcggcaccaatgaagagctggtcgaaatcgtaggagcgcagcacttgctcggcgacctggccctggaacgagtccgaatgcgggtcccaggtgccgccggtcatcagcagcaccggctcgtgttccagttcgctcaaggcgctggccacatgcagggaattggtcatcaccaccagcccgggctggtggcccagttcgggaatcatcgcggcagtggtgctgccgctgtcgatgatgatgcgggcgtgctcgcgcaggcgcatcacggcggcacgggcgatggcgcgcttgtacaccgagacgggttgagtggcgtcgcccaccagttcctggggcatggtgatggcgccaccgtagcgacgcagcagcaggccgttgctctccagggcagccaggtctttacggatcgtaacttccgacgtttcgaaacgcttggccaactcgtccacgctgacttcgccctgttcattgagcaaggtcaggatgttgtggcgccgttggggtgtatttcgtttcgacatggtgatggtaagtttcgtttcgaaagataacgaaggcaatcaaaacctattggcgaaagatcgtcaagcgggacgcagcaaatttttatgcgacacagagcaagtgtgggagggggcttccccccgattgaggtctatcagctacaaagatgttggctaatagtctgcaatcgggggcaagccccctcccacattgaataccttccgctgaggaggctgtggataactcaggtctttttgattttgaccggacgtttccaaccgtcgatgttgcgctggcgggcacgggcgacagccagttgagacttatccacatcctggttgatggttgagccggctgcagtgctggcgccatcgtcgagggtaaccggggccaccaacgaattattcgaaccgataaacacgtccgccccaatggtggtctggtgcttgttggcgccatcgtagttacacgtgatggtgccggcgccgatgttggtgcgcgcacctacggtggcgtcacccaagtaggtcaggtggccgactttggcttcggcgtccaacttggcatttttcagttcaacaaagttacccacatgagccttggctcccagcacgctacccggacgcaaccgcgcaaacgggcccgcatcactgccctcgcccatcacggcaccatcgatatggctgttggccttgatcaccacgcccttgcgcaaggtgctgtccttgatcacgcagttcgggccgatcaccacgtcatcttcgatgaccacacggccttcgaggatcacgttgatgtcgatcagcacgtcgcggcccacgatgacctcaccgcgtacatcgaagcgtgccgggtcgcgcagggtcacgccctgggccatcaggcggcggccttcgcgcagttggtaatgacgttcaagctctgcaagctgcttgcggtcgtttgcaccctgcacttccatcgggtcgtggggttgctcggtggcgaccagcaggccatcactcacagccatctcaatgacgtcagtgaggtagtactcgccctgggcgttgttgttggacagacgactcatccagtcggcgagcttattggcagggaccgcgagaatgccggtattgccttcggtaatggcgcgctgggcttcgctggcatccttgtgctcaacaatggccgcgaccttgccatcggcgttgcgcacaatgcgcccgtagccggtggggtcgtccagctcaacggtcagcaggcccatctggcctgggactacatgcttgagcaggcgttgcagcgtttcgacttcgatcagcggcacgtcgccgtagaggatcagcacagtatccgcggtgataaacggcacggcctgcgcggtggcgtggccggtaccgagttgtttgtcttgaagaacgaaattcaagtcgtctgcggcgagacgttcacgcaccgcatcggcaccgtgaccgatcaccacgtgaatgcgctgggggtcgagctgtcgggcgctgtggataacatgacccagcatggaattgccggcaaccgggtgcagcaccttgggcagggccgaacgcatgcgggtgccctggcctgcggcgagaatgacgatttcaagagacatgagtggctaccaatcctgggcggtccggcttcagaccagagaagtgttttgcaaaaaaagaaaaagggtagccgaggctaccctttttaatcaatcgcgcatgaaacaagaaggcgtggccgcttacttcttgcgcaactgctggagcgtgcgcagctgggctgcagcctcggccaaacgtacagcagcagcgctgtagtcgaagtccgcacccttttcgttcagggccttctcggcagccttgacggcttcctgagcggaggcttcatccaggtcgccagcacgttgcacggtgtcggcaagtaccttgaccatgttcggctgaacctcgaggaaaccaccagagatgtaaaacacctccttttccccgccctgcttggtcagcgtgatcggacctggcttcaagctggtgatcaacggcgcgtgacccatggcaataccaaggtcaccgagttcgccgtgtgcaatcaccatctctaccagaccggagaagatttccccttccgcgctgacgatatcgcaatggactgtcatagccatctgattgcctcaacctgatgagcgcccgtttccgggcgcctggattacagtttcttggctttctcgatcgcttcttcgatgccgccgaccatgtagaacgcttgttctggcaggtggtcgtagtcaccgttgaggatgcctttgaagccagcaatggtgtctttcagggaaacgtatttacccgatgcaccggtgaagacttcagccacgaagaacggctgcgacaagaagcgctggatcttacgagcgcgggataccaactgcttgtcggtttccgacagctcgtccatacccaggatcgcaatgatgtccttcagttctttgtaacgctgcagcacgtactgaacgccgcgagcggtgtcgtagtgctcctggccgatcacgttcgggtccagctggcgcgaagtcgagtcgagtggatcgaccgctgggtagatacccagggaagcgatgtcacgggacagtacgacggtggcgtccaagtgggcgaaggtggtcgctggcgacgggtcggtcaagtcatccgcaggtacgtataccgcttggatcgaagtgatcgaaccttccttggtcgaagtgatacgttcttgcagaacgcccatctcttcagccagggtcggctggtaacctactgcagaaggcatacggcccagcagtgcggatacttcggtaccggccagggtgtaacggtagatgttgtcgacgaacagcagaacgtcgttaccttcgtcacggaacttctcggccatggtcaggccagtcagtgctacgcgcagacggtttcccggcggctcgttcatctgaccgtaaaccagtgccactttgtccagaacgttggagtccttcatctcgtggtagaagtcattaccctcacgagtacgctcacccacaccggcgaacacggaataaccgctgtgctcgatggcgatgttacggatcagttccatcatgtttacggtcttgcctacaccggcaccaccgaacagaccgactttaccgcccttggcgaacgggcaaaccaggtcgataaccttgatgccggtttccagcaggtcgttgccgccagcttgttcggcgaacgaaggtgctggacggtgaatgccccagcgctcttcggtgtcgatcgggccagcttcgtcaatcgggttgcccagtacgtccatgatccggcccagggtcgctttaccgaccggtacggagatggcagcgccagtgtcgacaacgtccagaccgcgcttcaagccttcggtggaacccatcgcaatggtacgaactacgccgtcgcccagctgctgctgaacttccagagtagtttccgcgccttgtactttcagcgcgttgtagatgctcggtacgctgtcgcgtggaaattccacgtcgataacggcgccgatgatttgaacgatacgtccgctactcatagctggatcctctgaatatttgaaccgttaaaccgcggcagcgccgccgacgatttccgagatctcttgggtgatcgcagcctgacgcgccttgttgtagatcagctgcaaatcgctgatcagatcaccggcgttatcggtagcgtttttcatcgcgatcatccgcgccgcttgttcagctgcgttgttctcgaccaccgcctggtacacctgcgactccacgtagcgcaccatcaagccgtcaagcagctctttggcgtctggttcgtagaggtagtcccagtggtgcttgagttcctgatccggggtcgccaccagtggaatcaactgctccacggttggctgctgggtcatggtgttgatgaacttgttggataccacggacaggcggtcaatccggccttccaggtacgcatccagcatcaccttcacactgccgatcaaatcattgatcgacggctcttcacccaggtggctgatagctgcaacgacgttaccgccgaagttgcggaaaaaggccgcacccttgctaccaacgacacacagatcgatctcgacgccgttttcgcggtttaccgccatgtccttgaccagggccttgaacaggttggtattcagaccaccgcacaaaccacggtcactgctcacaaccacataacccacacgcttgactgcgcggtcgatcatgaacgggtggcggtattccgggttggcgttggccagatgcccaattacctggcggatacgctccgcataaggacggctagcagccatgcgcatttgtgccttgcgcattttgctgaccgccactttttccatggcgctggtaattttttgcgtgcttttgatgctcgcaatcttactgcgaatctcttttgcgcctgccatgtaacacctatcaggttagcaagcgggagccttgcggctcccgctgcggcttaccaggtttgggtggccttgaacttctcgataccggctttcatgccagcgtcgatatcgtcattgaagtcacccttcacgttgatcttcgccatcaattcggcgtgatcgcggttgaagtaagcaatcagcgcttgttcaaagctgccgaccttggcgatttcaacgtcggtcaggaacccacgctcagcggcatacagcgacaacgccatgtcagcgatcgacattggggcgtattgcttctgcttcatcagctcggtaacgcgctgaccatgctcaagttgcttacgggtcgcttcgtccaggtcagaagcgaactgggcaaatgccgccagttcacggtactgagccagagcggtacggataccaccggacagcttcttgatgatcttggtctgagcggcaccacccacacgggataccgaaacaccggcgttcactgcggggcggatgcccgagttgaacatggccgattccaggaagatctgaccgtcggtgatggaaatcacgttggtcggaacgaacgcggaaacgtcgccagcctgggtttcgatgatcggcagtgcggtcagggaaccggttttgccggtcactgcgccgttggtgaacttctctacgtactcttccgaaacgcgggatgcgcgctccagcagacgggagtggagatagaacacgtcgcctgggtaagcttcacggcctggtggacggcgcagcagcagggaaatctggcggtaagccactgcttgcttggacagatcgtcataaacgatcagcgcgtcttcaccgcggtcgcggaagaattcacccatggtgcaaccggagtacggtgccaggaattgcagcgcaggagactccgaagcactggcagccacgatgatcgtgttggccagggcaccgttttcttccagcttgcgaaccacgttggcgatggtcgattgcttctgaccgatagcgacgtagacgcagaaaatgccgctgttcttctggttgatgatcgcgtcgatcgccagagcggttttaccgatctgacggtcaccgatgatcagctcacgctggccacggccgactgggatcatggcatcgacagccttgtagccagtctgtacaggctggtctaccgacttacgccagatcacgcctggagcaactttctcgaccgcgtcggtctcggtgttgcccagtggacctttaccgtcaacagggttacccagtgcgtcgactacgcgacccagcagttccttaccaaccggaacttccaggatgcggcctgtgcacttggcgctcatgccttcagccagactggtgtacgcgcccaatacaacggcacctacggagtcttgctccaggttgagggccataccgtagacgccgcccggaaactcgatcatctcgccgtacatgacgtcggccagaccgtgaatccgcacgatgccgtcagatacgctgacgacagtgccttcgttacgggcttgggaggtcacatcgagcttgtcgatgcggcccttgataatttcacttatttcggaaggattgagttgctgcattgctctgctgccccttcaaactcaagatttcaatgcttcggcaagtttcgcgatttttccgcgaatcgagccatcgataaccaggtcgccggcacggataacaacaccaccaatcagggatgcgtcctccgaagcttgcaggcgcacttcccgattgagtcgtgcactgagaaccttggcgagtttgtcttgctgttcttggttcaatgcgaaagcactggtcacttcaacgtctaccgatttctctgcttcggccttgtacaagtcgaacagagcggcaatctccggcaacagcgggagacggtcgttttcggcaacgacgtgaatgaagttctgcactttcacatcaaacttgtcgccgcacacttcaataaaagtggcggccttgtctgcgctcgtcaggcgcggggccttgagcacgcgctgcatggtgtcgtcttgcgacactgctgcagccaggccgagcatggctgaccaagaggccagctgctggtgggcctgggcgtgctcgaaggctgccttagcgtaaggtcgggccaacgtggtcagttctgccatgatcgccctcgcttaaatttcagcagccagtttgttaaccagctccgcgtgcgcgttttgatcgattgtggcaccgaggatcttctcagcaccgccgaccgccagagcacccagttgggcacgcagcgcgtctttgacgccgttcagttcctgttcgatctcggcatgagccgaagccttcacacggtcagcttcgacgcgggctttttcaacagcctcttcgacgatctggttaccgcgtttcttggcttgctcaatgatttcagctgcctgtgccttagcatcgcgcagttggtgacccgctttctcttgggccaactccaggtcgcgagctgcacgggtggcagcgtccaagccatcagcgatcttcttctgacgttcgtgcaaagccgcgatgaccggaggccacacgaacttcatgcaaaacactacaaaaatgaagaacgcaacggattggccaatcagggttgcattaatgttcacgccaacacctcgctcattcgttgtccatcactccaatcaactcgaaaattcgagtgattagccagcgagttgaccaacgaaggggttcgcgaaggtgaagaacagagcgataccaacgccgatcatggtcacggcgtcgagcaggccggcgacgatgaacattttaacttgcagcattgggaccatttctggctgacgcgctgcgccttccaggaatttgccgcccagcaggccgaaaccaatggcagtacccagggcgcccaggccgatcaacagtgcaacagcgatagcggttagaccaactacagtttccatctttcctcccgacttttacgtcgtatggtttaggttttttagattttaaagcggtaaaacaaatcgtttcatagcccggtagggcctaccttcccgtttcaccgggaaggacatcagactagtcgagactggtcttaatggttctcttcgtgcgccatcgacaggtagacgatggtcagcatcatgaagatgaaggcctgcagggtgatgatcaggatgtggaacacagcccacgcccactgcagaaccacgcccaggccgctaagccagagcagaccactgccgaacatcacagcgatcagaatgaacaccagctcgccggcatacatgttgccgaacagtcgcagggccagggagatcggcttggcgaccaaggtcacgaattccagcaggaagttcaccgggatcagcagggcttgaacgaagatgttcttgctgccgaacgggtgcagggtcagttcgccgatgaagccgccgatacccttgaccttgatgctgtagaaaatgatcaacgcgaacaccgacagggccatgcccagggtggcgttagggtccgtggtggaaaccgcacggaatgggatgtggtggtcgccggagatcaggatagccagttgaggaatccagtcgaccggtaccaggtcgacggcgttcatcaggaacacccagacgaagatggtcagtgccagcggtgcaatcaccgggctgcggccatggaagctgtctttcacgctgccatcgacgaattcgaccagtacttcaacgaagttctgcaaagcacctggctgaccggaagtcgccttctttgccgccatgcggaaaatcaggacgaagatcagacccaatgcgaccgaccagcccagagtatccaggtggaaagcccagaagcccatttctttggcttctgctgcggagtgggcaaagccccagccgccattaggaagctgaccgaaggtcaggttctgcaagtggtgctggatatagcccgaagcggttgtttctgccatggttgcctcaaacgccctaaggtttcgaaagtcttgttttcattagcaggggagcgaaccagctgaccagttgggtcaacacgaagacgccgaatacagccagcggcgccaatggcttcacacctgcaaaggtcagtgcaaacagcactgccgtcaaaatcagtttccccgcctcgccagcataaaatgaccggacgatagcctgggctgctcgggcgccggaaaaccgaaaggccctgtgagcaaaatacatattgggcagcaaggctatcaggcctccgcagagtcctgaatatccgactacgactccatgccaataccaaagcgccaatgcggcgatcagcaagatgacaaattgagccaataaaaccggaaaaacggccaagcgatggaacggcaacgtgtttggcgtgcgggtttccatcactcttgctcctcaatggtcggctgccggaaatcaataacttggcataatttgtgccgacaaaatgcgcgcagagtataggggcggttctgcccctattcaactgccgggtagtgatttccgatcacgcgctacataagcaaatgtttcagcggatgtgggcaaggacgccctgaagctcatcaagggagttatatccgatgaccaattggcctttgcctttcttcccgtggcgaatttgcaccgcagagcccaggcgctcggccaggcgctgctcgagacgggcgatatccggatcaggtttggccgtttcgaccggtgcaggtttgccgctgagccattggcgaaccagggcctcggtctgacgaacggtgagcccccgtgcgacaacgtgtcgcgccccttcaacctgttgattttccggcaaaccgagcagtgcacgggcgtggcccatttccaggtcgccgtgggacaacatggtcttgatgacttccggcaacgcgatcaggcgcagcaagttggacacggtcacgcgggatttacccaccgcttcggccacttgttgctgggtcagctggaattcctgctgcaaacgctgcagggcgatggcttcttcaattgggttgaggtcttcgcgctggatattctcgatcaacgccatggcgatggcggtttcatccggcacatcgcgcaccattgccggaatggtttccttgcccgcctgctggctcgcgcgccaacggcgttcaccggcaatgatttcaaagcggccgccaccgatcgggcgtaccacgatcggctgcatcacgccctgggccttgatcgaattggccagctcttccagcgcctgggggtccatgtcccggcgtggctggtatttgccgcgctggatcaggtccagcggcaggtgttgcagctcgcgctcgtcggcctgcaccgcttgttcttcaagcgatgtgacggtcggaccactcaacagtgcatccagtccacgtccgagacctcgtttcttgacggccatggggattccttaagttggctgggctgcagcagtgcgtgaattgcggcgttggcgacgaaccatctcgccggccagcgccaggtaggcaatggcaccacgggattgtttgtcgtaggccaaggccggcatgccgtagctcggggcttcggccaaacggatgttgcgtgggatcaccgtgtcgtacagctggtcaccgaagtgttccttgagctgcgccgatacatcgttcatcaggctcaggcgcgggtcgaacatggtccgcagcaagccttcgatctgcaggttcgggttgagcaactcggcgatgcgcttgatgttatccacaaggtcgctcaacccttccagcgcgtagtactcacactgcatggggataatcaccccatctgccgctaccaacgcgttcagcgtgagcatcgacagcgacggcgggcagtcgatcagaatgtagtcgtaattctcgcggatcggcgccagggcgctgcgcagacggctttctttcatctgcatttccagcagcaccacttccgccgcagtcagatcgcggttggccggcagcagttgataaccaccgtgctcggaatagtgcatggcctgggccaggtcgcactcgccaatcagcaagtcgtagaccgagttttccaggccgtgtttatccacaccgctacccatggtggcgttgccctgtggatcgagatcgatcaacagcacccggcgcttggtcgcgaccagggatgctgcgaggttgatgcaggtggtggttttgcccacgccacctttctggttcgctatcgcgaataccttagccattcttgcttgtgttcccaatcatgccgtgcggcgcagtatcagcagatggcgttggccttggcaaccgggtacggccaaggcgtgttcgctatcgaggtggaagtctgccggcaatgctaacagctcatcgcttggatggacgcccttcattgccagccagcgggtgtcgcggtcgcccaggtggcgggtccagttgctgaagttctccatgctgctgaatgcccgggaaacaattccgttgaaaggctgttcaggtgtgaaggcttcgacgcgactgtggataacttgcaggttgttcagcttgagctcgagtttgacctgggtcaggaagcgggttttcttgccgttgctgtccaggcaagtcacttgggactcgggaaacaggatggccaacgggatgcccggcataccgccgccactgccaacgtccaaccagcggccgttttcgatgaatggcatcacgctcaagctgtcgagcaagtgacgggacaccatctcgtcgggatcacgcaccgcggtcaggttgtaagccttgttccatttgatcaacagggccaggtagcccaacagcaattcgtgctgggccggggtcaggtcgacgcccaactggcgtgcacctgtggataactcttcggcatgttgcgaggtgaccaacgaactcaagcgctttgctccaactgacggcccgcgccgcgttttttcaaatgaatcatcaacagcgaaatcgctgccggggtgacgccggggatacgtgaagcctggcccagggtctctggccgagttatccccagcttgctttggatttctttcgacagcccggaaatcccggtgtagtcgatatccacaggcagtttggtgtcttcactggcgcgcaagcgggcgatctcgtcctgctggcggtcaatgtaaccggcgtatttggtcttgatttcgacctgctcggcgacctgcgggtcttctgcgccctgtccggtcacttcgaccagaccagcgtagtcgatttccggacgggacagcaggttcagcaagttgtattcgtgggtcagtggcgtgccgaatttttcggcaatcgcatcgccctgctcggtgcccgggcggacccaggtgcttttcagacgctgctcttccagcgcgatgctttcgcgttttttgcagaaggcttcccagcgtgcgtcatcaaccaagcccagttcgcgacctttttcggtcaggcgcaggtcggcgttgtcttcgcgcaggatcaggcgatattccgcccgggacgtgaacatccggtacggctcctgggtacccagggtaatcaggtcatcgaccaatacaccgatgtacgcctcatcgcgacgcggacaccagctgtctttaccttgtgcacgcaatgccgcgttggttccggccagcaaaccttgggcaccggcttcttcgtaaccggtggtgccgttgatttgcccggcaaagaacaaaccgccgatcactttggtttccaggctgtacttcaggtcacgcgggtcgaagtagtcgtactcgatggcgtagcccgggcgcacgatgtgcgcgttttccatgccgcgaatcgattgcacgatctggatttgcacgtcgaacggcagggaagttgaaatcccgttcgggtacagctcgtgagtggtcaaaccttcgggctcgataaagacctggtggctttccttgtcggcgaagcggtggatcttgtcttcgatcgacgggcaataccgtggaccgatgccttcgatcactccggagtacatcggcgaacggtcgaggttcgcggcaatgatttcgtgggtgcgcgcattggtgtgggtgatccagcagctcacctgtttcgggtgctggtccttggagcccatgaacgacatgaccgggatcggtgtatcgccggcttgttcggtcatcaccgagaaatccacggaacgcccgtcaatacgcggcggggtcccggttttcaagcggccgacacgcagcggcagttcacgcagacgttttgccagggcaatcgacggcggatcaccggcacggccaccggaatagttctgcatgccgatgtggataagtccgccgaggaacgtaccggtggtcaacaccacggattctgcgaagaaacgcaggcccatttgggtgacaacaccgcgcacttggtcctgttcgacgatcaggtcatctgctgcttgttgaaatatccacaggttcggctggttttccagggtttcgcggaccgcggccttgtacaggatgcggtcagcttgagcccgggtagcacgtacggccgggcctttgcggctgttgagcacgcgaaattggataccgcctttatcagtagccatggccatcacgccgccaagggcatcgatttccttgaccagatggcttttgccgatcccaccaatggcagggttgcaactcatggcaccgagggtttccacgttatgcgtcaacaacagggtttttacgcccatgcgtgctgacgccagtgctgcctcggtaccggcatgaccgccgccgatgacgatcacttcaaaacgggaagggaaatccaccacgcacctcgtgcctgcttatttaggtaatcaggaattgattgttgaaagagttttagagctttggcggcaagtatagggacttagcccttcctaaagaaccctttgcacaaaatttaaccagctgtggatgaatcacagacaatagaaattaaaagagagaaatttattaaatctttgtttttatgtttatttctactgagctgactttctgtggatagatttacacaggcctttatttacggtgtgtacagcgattcaaaagtctgtggtcatgtgccaatgaggcccttggataagtgctttaagcctgtggattaaacaggttgttatccacagatgcgtttttgctcaggtttcagggcctgttatcaactgggcacaggggcggttattcacagagcttaatccacagaaatcagtgaatttgtctgtattcagcccacgacaacgccaaccgaaaccttccactcggtggtgagcacagcaaaaagagatctgttgtgagaaaacggcggggcagttaataatagcgattatcattaacctaccttgtcatgccctatgtcctcttcttcacacacggctgcggtccagcacatctatgagcagcaccactcctggctgcacggatggctcaaagggaagttgcataacgcctgtgatgcggccgatgtggcgcacgatacgttcgtacgcatcctgggcgggcgccatgcggcacagatcgttgagccgcgtgactacctggcgactatcgccaggggcctggtgattgatcgttaccgtcgacacgcgatcgaacaggcctacaaacaaaccctggccgaacggcctgaagccataaccatcagtgaagaagacaaagccatcatcatcgagacgttggtggctgtggataaagccttgtctgcactcggcgagcgagcgcggcggatattcatgctgtcccaggtcgaagggctgacttatcaacagatcgccgatcagcttcaggtttcactgaccacggtgaagaagcacatgatccgagcgttgactgaatgtgcgctgatcatggccagcctgtgatggcggtgcccgatcgcaagaccttcgaggccgctgccagttggtacgtccagtttcaatcccagacacccaccgccgatgagcgccaagcctggcaacgatggctcaacggcgatccgtcccatcaggctgcgtggaaccagatggaacagctgcagcgcagtctcggcgcgctgcctgcggatttcacccgccgcgcattgtcgaccacacagcaacgccgccaggtgctcaagtggatgttggtgctgggcggcaccgggtacctgggttggaatgttcagcaacacacgtccctgggtagtgtgtgggccgattatcggacggtcgtaggtgaacgccggcgcattgaattggccgacggcacgcggattgatctgaataccggcacggcgattgatgtgctgtttgatgggcgccagcgtttgatccgcctgcgcgaaggtgaggtccttatccacaccggcaagcggggcgtgcagacgcccttttatgtcgaaacccgccaaggccgcatccaggcattgggcactcggtttaccgtgcgccagatgcatgactcaacccgcgttggcgttctggaggatcgggtgaatgtgtcgcctggtgaccagcccaaccaggctcggctgctcagtgcgggtgaaagcgcagacttcgatcgccaaatagtgcagccaaacgccgtttaccgcacatcccaggcagcctgggtcgatggccaactgatcgtattggatgcacgcctcggtgatgttgtcgaagaactcgcccgctatcgcccaggtgtcctgcaatgcgaccgggactcggcacatctgcgtgtttccgggacttttcgcctggattccaccgatgcggtgctggccaatctgcaggccaccctgccgattcaagtgaaatacttcactcgctattgggtttcggtgaagcgaatcggctgatcgaaaaaatatacgcacgcagggttatcttttttttacctgacacggccctacaggtaatcacgatgccaccttcagggcttacccacctatgcgcgttcccaccaagctccgccagcgactttcctaccacggtatgacatgcagcctgctgctcggcacggccgccactgtcggtgtgttgttatccacaagcgccctggccgccagcgcggtgcagcactacgttattgcggccggccccctggataacgccttgagccaatttgccgccaaggcgaatgtgatcctgtctttttcacctcagcaaaccacgcgtttaaacacagctgggctggaaggtgactactccgtggaccaaggttttgcgctgctgctgcaaaactccggtttacaggcggtagtccaggcgcctggcagttatgtcctgcaggccgcttccaccggcgaactcacgctcgcgcccaccacggtcagcacttatcaacagggcggtttcaatcaggagattgctggagatgtgggctacaaggcgcagaacagtagagttggtaccaagaccagtacgccgctgtcggaaacaccacgttcggtatcggtcgtcaccggccagcgcatcaaggaccagaagtcgcaaaccctgaccgaagtgttgggctacgtgcccggtatctttgcaccaccctttgccgccggtgatgggctggcgggcgatctgttcttcattcgcggttttaatgccacggattacggctacggcctgctgcgagatggcctgcgtgtacaaggtaatcggtacgacaccaccagtgagccctatggcctggaacgggttgaaatcttccgtggtccttcttccctactctacggcgaaaatgcgcctggcggtctggtgaacctggtgagcaaacaccctactgcgacgccgcaaggtgaagtgcagttgggttatggctcgaataatcggcgtcagttgggtgtggatatctccgggccgctcaatgacagcggcaatatccttggccgggtagtgatgctcggtcgcaaatccgacacgcagaccgaccatgtgccagacgatcgcctatacatcgcgccatcactgaccctgaatttcgacgactacaacaccctcaccctgttggccaattaccagaaagaccacactaatttggaactcggcctaccggctgccggcaccttacttacaaaccccaatggcaagctctccaagcacactatgctcggcgacccggattggaatacgtttgaacgcgaagcctggagtaccggttacgaattcagccacagcttcaacgatgactggcagttccgtcagaactcgcgctacatgcagtctcgcatcaaccgccatgaaacctggcccagcgcgctgaacaatcgcggcttcgggactcagttgaacatgaccgcttatgaccgctacaacaagtcgatggtctattcgctggataaccagctggaaggcaaattccaggtcggcggcctggaaaacacggtgctgttcggtgccagctatgaccgcacttcgttcagtcaggattgggacgcggggtttgccggcaccatcaatgtgtataacccggtgtacctgcgtgacccgctgacgccggtggcggtgcaaaacaccctgctcgaacagcagatgaaaggcgtttatgcacagatccagagcaagtacgaccactggctgttcctgctgggcggccgtcaggactgggtcgacagcgatttccgcgacaaggtcaacaaggccagcaacaccggatccgatgaccgcaagttcacctaccagggcggggtgatgtaccagttcgacaacggcctgacgccgtatgtcagctactccactgcctttgtccccgtgcagcagatctccaacgccggctcgcccttgaaaccgatcaccagcagccagtacgaagtgggcgtgaagtacgagccgatcggctgggatacggcgatgacggtgtcggtgtatgacttgcgcaaggaagacgacacttacctcgatgccaccaccaatagctatcgccaagtgggcgaaagccgggccaagggcgctgaggtagaggtcaacagtaacctcacgcctaacctcaatgtcaccgcagcctatacctacactgacgcgaggattaccaaggattcggcgacatcgttggtcgagggccaccagatgaccggggttccgcgtaaccaggcctcagtgtggggcaagtaccgcttcctcgatggccaactcaagggcttgtccctgggcggtggtgtgcgttatttcgacagtaccttttcctacaccgcacccacgctttacggaaaattggatgcaggaagcgtcaccttggtggacgcagccgttggctatcagatagacaaacactggtctgtggatgtaaatgccaagaacctgttcgataaggaatatgtatctggttgcaacgatgcgggccgctgctattggggtgacagccgtaccctgctcggtacggtgtcttacaattggtaggacgctgtggataactcggttatttaccgatgcagaagctggaaaagatccgccccaacaaatcatcggagctgaacgcgccggtgatttcgcctaacagctgctgtgcctgacgcaaatcttccgccagcagctccccagcccccgccaaggttaattgcgcccgaccgtgctccaacgctgcgctcgcatggcgcaacgcctccaggtgcctgcggcgcgcactgaagctgctttccgaggtctgctcgtagcccatgcaggccttgaggtgctctcgcagcagttccaagccttcaccggccgacttcgcactcaggctgatcgtgacgtggccatccgcgctggtttccagcgcaatggcttcaccggtcaagtcagccttgttgcgaatcagggtgaccttggcagggtccggccggtgctcaaggaattccggccacagggcgaaaggatccacagcctcgggcgccgtagcgtccactaccagcaatacccgatccgcctcgccgatggctttgagcgcgcgttccacaccgatcttttccacctggtcgtcggtgtcgcgcaaaccggcggtgtctacaacgtgcagcggcatgccgtcgatgtggatatgttcgcgcaggatatcccgtgtggtgccggcaatctcagtgacgatggcggcttcacggcccgccagggcattgagcaagcttgatttccccgcattgggccgccccgcgatcacgacggtcatgccatctctcagcaaagcaccctgcccggcttcacgcagcactgtggataactcatcgcgaactttatccagcatcgccaatacgtggccatcggcgagaaagtcgatttcttcttccggaaaatcaatcgccgcctcgacgtagatacgcaggctgatcagttgctccgtcaagttatgcacacgcagggagaacgcaccctgcagggagcgcaatgcattacgtgcggcctgtgcagaactggcttcaatcaggtcggcaattgcttcggcctgggccagatcgagcttgtcgttcaagaacgcccgctcgctgaattcacctgggcgcgccaagcggcagcccaattgcaggcagcgctgcagcaacatatccagcacaaccggaccgccgtgtccctgcaactccagcacatcttccccggtgaatgagttcggcccagggaaatagagcgctaatccttcgtccagcacgccgccgtcagcatccaggaactggccgtaatgtgcataacgcggcttcaactcacggccactgatggccttggctgccacgcccgcgagcggccctgaaattctaacgatgccgacaccgccgcgaccttgagcggtagcgacagcagcgatggtttcacgaggagcgctcatcaacagtttccagaccaaaagtgacagaaagcaaaacgccccactagggggcgtcttgagtggttatccacagagtaagttacgcagaggcttttgcggtagccgcttcgatcttacgtgtgatgtaccactgttgagagatcgacaacacgttgttgaccacccagtacagcaccagaccagctgggaaccacaggaagaagaaggtgaagatgattggcatcattttcatcactttggcctgcatcggatccggcggagtcgggttcaagcgctgctggataaacatggtcgcgcccatgatgatcggcaggatgaagaacgggtctttgatcgacaggtcagttatccacaggatgaacggcgcctggcgcatttccacgctttccaggagtacccagtacagcgacaggaacaccggcatctgcaccagaatcggcaagcatccacccagcgggttgatcttctctttcttgtacagctccatcatggcctgcgacattttctgccggtcatcgccatgttgttctttcagcgccgccagtttcggagccacggcacgcatgcgcgccatcgacttgtagctggctgccgacagcgggaagaagatccccttgatcagcatggtcaggaagatgatcgagaagccccagttacccacaatgctgtggatatgttgcagcaaccagaaaatcggctgggcgatgaaccacaggaagccgtaatccacagtcagctcaagacctggggacaactctttcagcacagcctggcttttcgggccggcgtacaggatagcgctggtttcagccttggcgccgggtgcgacggtcaacgccgggccggtaaagccaatgatgtagttaccttggctgtccttgcgggtttgaaccaggttggcttcacccttgttcgggatccatgcggtcacgaagtagtgctgcagccaggcaacccatccgccttgaacggtttctttcagcgagcccttgtcgatatctttcatcgacacttttttgtacggctcgctacttgtccacagggcggcgcccaggtaagtcgcggtgccggtagcagtgctggaagaaggatcggagctggcatcacgcttgagctgggcaaacaggttgccgctccatggtttgtcgctttcgttgtcgatcaggtaagtgaccttcaagtcgtacaaaccacgggtgaagctgaagcgcttgatgtagttgacgccgtcgaggctgaatttcaggtcgacgttcaactggttctggccatcagccagttgataagtcttctgttcggtcgagtaaatcggacgaccggtagcacgtgcatccggaccattggtgccggtcaggccgctttgcgccagataagtacgctcaccaccgttatcgaacagttggaacgggacatccggatggtcttggcgacgtggatacagcggcagtttcaactgcgcaatatcaccaccttgtgggtcgatagccaggtcgagcacatccgttttgacgtggatgaggtctttgttggtgaccactggcgtttctaaaggggcgcttgtctcgccattcgcgctgggaacatcggcactcgcggacgcattgttacccagcggggtgtccggaatagccggcgcagcctggttggtagcaacattctgagtcggcagggcagcctggccgtagtcctggttccactgaagaaccatgacgtaggacacgattgccagggcgacgatcaggatcgtgcgtttaatatccatgattactcggccatcgaagaagaacgggaggtagggataggtggaaccgggtcataaccaccgggattccacggatgacagcgacctaaacgacgaaaggtcagccagccaccgcgcagaagaccatggttttctatggcctctaacgcgtagcaggaacaactggggtagaaacgacagtggttggccatcagaggactaatggcatagcgataaaactggatcggaacgagtgccagtttacgcatcaaggctgtctacccctacagtttcggtgctgactgctggtgctggcttgtgggtacgcgccaaacgtttccagagcttgccgaaatgctgaatcaattcggggttttctacgtcccccaagcctttgcgcgcgacgataacaatatcccaaccaaccagagtgtcctggtggaggcgaaacgattcgcgcatcagacgcttgaggcgattgcgctcaacggagagctttacgctcttcttgccgatcaccaacccgagtcggggatgatccagatcgttgttacgcgcaaggagcaggagatttttccccggaaccttgccggtgggggagtcaaagactgccttgaaatgccggggggttagcagacgcttttcccgactgaagtcctgactcaccaccagtaccggattatcaaactgccagacgcgcacgacctttggcgcgacgacgcgacaggacagcacggccgttcttggtagccatgcgagcacggaagccgtgggtgcgggcgcgtttgatggtgcttggttggaaagtacgtttcatggcgttgttacctggttcgtccacaacgggccggaatggcccccgttttaagagaccggcgattctagtgaaagcaagcctctaggtcaatttccaaccagcttttcctttaattagatctccacaggccattggctcttttctgtccgtttggtttccagtggtcatgggatagatataaaaataaagaaggaagttatttaaagcttttctgtaaagcttataaaagctaggtaggcgttcatctgtggataactcacttgaggccatattccacctggtgtacagagaatgacaacccgggggagaaacggtgctctgcctgtgctgcgctgtcggataagctgtgcgtggaacgggatgttatccacaggccagttacccacagactttctcccccacttgtgcaacgacctcaggtaggcttatccacagagcttatgcacagaccattggtcgcctttattaccgttaagacgttgattttggccggcctgtgatcaagctacatgtggataagtggacggctcgccgctacaatggcggctgtttttgcctcaccggctttcaacttaggggatatccgtgtcagtggaactttggcagcagtgcgtggagcttttgcgcgatgagctgcctgcccagcaattcaacacctggatccgtccgctacaggtcgaagccgaaggcgacgagttgcgtgtctacgcacccaatcgttttgttctcgattgggtcaacgagaagtacctgagccgcgttctcgaattgctcgatgaacatggcaacggcctcgcgcccgtgctctccttattaataggcagcaaacgcagctctgcacctcgagctgctccgaatgcgccattggccgctgcggcgtcgcaagcccaggcagccgccacaccggctgccagtgcgcctgctcctgcaccggcggcgtccaaatcgtctgcgcgaaaaagtgcgccagaaaacgaagagccatcccgcgatagctttgacccgatggcaggcgccgcgtcccagcaagccccggtccgcgccgaacagcgcaccgtccaggtcgaaggcgcgctcaagcacaccagctacctgaaccgtacgtttaccttcgagaatttcgtcgaaggtaaatccaaccagttggctcgcgcagccgcctggcaggtcgccgataaccccaagcatggttacaacccgctgttcctttatggtggtgttggcttgggtaagacccacttgatgcacgctgtgggtaaccacctattaaagaagaacccgaatgccaaggtcgtgtacctgcactcggagcgcttcgtggctgacatggtcaaggccttgcagctcaacgcgatcaacgagttcaagcggttctatcgctcggttgatgcgttgctgatcgatgacattcaattctttgcccgcaaagagcgttcccaggaagagtttttccacaccttcaacgccctgctcgaaggtggccagcaggtcatcttgactagcgaccgttatccgaaggaaatcgaaggcctggaagaacgtctgaagtcgcgcttcggctggggcctgaccgttgcggtagagccgccggagctggaaacccgcgtcgcgatcctgatgaaaaaggccgatcaggccaaggtcgacctgccacacgatgccgccttctttatcgcccaacgcatccgctccaacgtgcgtgaactcgaaggtgcactcaagcgggtcatcgcgcactcacacttcatgggccgcgacatcaccatcgagctgattcgcgaatccctcaaagacttgttggcgctgcaggacaaactggtgagtgtggataacatccagcgcaccgtggccgagtactacaagatcaagatttccgacctgttgtccaagcgccgttcgcgctcggtggcacgtcctcgccaggtggccatggccctctccaaggagttgaccaaccacagcctgccggaaatcggtgatgtgtttggcggacgcgaccacaccacggtcttgcacgcgtgccgcaagatcaatgaacttaaggaatccgacgcggatattcgcgaggactacaagaacctgctgcgtacactgaccacttgatgacaccagcgcagcttattaaggcaagggactagaccatgcatttcaccattcaacgcgaagccctgttgaaacccctgcaactggtcgcaggcgtcgtcgagcgccgacagaccttgccggtgctctctaacgtattgctggtcgtccaaggccagcaattgtccctgaccggtaccgacctggaagtcgagctggtcggccgtgtacagctggaagaacccgccgaacccggcgagatcaccgtgccggcgcgcaagctgatggacatctgcaaaagcctgccgaacgatgcgctgatcgacatcaaggttgatgaggcgaagttggtcgtcaaggccggccgcagccgcttcaccctgtccacgttgccagccaatgatttcccgacggttgaagaaggcccgggttcgctgacctgcagcctggatcagagcaagctgcgtcgcttgatcgagcgcaccagctttgccatggcccagcaggacgtacgctactacctcaacggcatgctgctggaagtgtcggaaggtatcatccgcgccgtcgctaccgacggtcaccgtttggcaatgtgttcgatgcgtgccgatatcggccaaccggatcgtcaccaggtgatcgtgccgcgcaaaggtatccttgagctggcgcgtctgctcaccgagcccgaaggcaacgtcagcatcgtgctgggccagcaccatatccgcgccaccaccggtgagttcacattcacttccaagctggtcgacggcaagttcccggattacgagcgcgtgttgcctaaaggtggcgacaagctggtgctgggcgatcgccaagcgctgcgtgaagcgttcagccgtaccgcgatcctgtccaacgagaagtaccgtggtatccggctgcaactggccaacggtcagttgaagatccaggcgaacaacccggagcaggaagaagcggaagaagaagtgggcgttgactacaacggtggttcgctggaaatcggcttcaacgtgagctatctgctggacgtgctgggtgtgatgaccaccgaacaggttcgcctgattctgtcggactccaacagcagcgccctggtgcaggaatccgacaacgacgactcggcttacgttgtcatgccgatgcgcctgtaaccatgctcagcagaagctagatgtccctcagtcgcgtctcggtcaccgcggtgcgcaatctgcacccggtgaccttctccccctctccccgcattaatatcctccacggcgccaacggcagtggcaaaaccagcgtgctggaagccatacatctgttggggcttgcccgttcctttcgcagcgctcgcctgttacctgtcatccagtacgagcaattggcctgcacggtgtttggccaggtcgaactggctgaaggtgggcacagcagcctgggcatatcccgagatcgcggtggagagttccagattcgtattgacgggcaaaatgctcgcagtgccgcgcagcttgcggaaattctgccgctgcaattgatcaaccccgacagctttcgtttgttggaaggtgcaccgaaaatccgcaggcagttcctcgattggggagtgttccacgtggaaccacgtttcatggccacgtggcagcgcttgcagaaggccctgcggcagcggaactcatggctgcggcatggtacacttgacgccgcttcgcaagcggcctgggaccgggaactgtgcctggccagcgacgaaatagatgaataccgccgcgcctacatcaaagccttgaaaccagtctttgagcagactttgagtgagttgttggacctcgaagggctgacgctgagttactaccgtggttgggataaagaacgtgagctgagtgctgtgctcgcgacgtccctgcagcgggatcagcaaattggccatacccaggccggaccacaacgggctgatttgcgccttagattaggcgctcacaatgccgcggacatcttgtcccgtggtcagcagaagttggtggtgtgcgcgttgcgtatcgcccagggccatttggttagccaggctcgacgcggtcagtgtatttatctggtggatgacttgccgtcggaactcgacgagcagcaccgccgcgcgttatgccgcttgttggaagaattacgctgccaggtgtttatcacttgtgtagaccacgaattattgagggaaggctggcagacggaaacgccagtcgctttgttccacgtggaacaaggccgtatcacccagacccacgaccatcgggagtgaaggcatgagcgaagaaaacacgtacgactcgaccagcattaaagtgctgaaaggtttggatgccgtacgcaaacgtcccggtatgtacattggcgacactgatgacggtagcggtctgcaccacatggtgttcgaggtggtcgacaactccatcgacgaagctctggccggtcactgcgacgacatcagcatcatcatccacccggatgagtcgattaccgtgcgcgacaacggtcgcggtattccggtagacgtgcataaagaagaaggcgtttcggcggcagaggtcatcatgaccgtgctccacgccggcggtaagttcgacgacaactcctacaaagtctccggtggtttgcacggtgtgggcgtgtcggtagtgaacgcactgtccgaagagctgatcctgactgtgcgccgtagcggcaagatctgggaacagacctacgtccacggtgttccacaggaaccgatgaaaatcgtcggtgacagtgaaaccaccggcacccagatccacttcaagccatcggctgaaaccttcaagaatatccacttcagctgggacatcctggccaagcgtattcgtgaactgtcgttccttaactccggcgtgggtatcgtcctcaaggacgagcgcagcggcaaggaagagctgttcaagtacgaaggcggcttgcgtgcgttcgttgaatacctgaacaccaacaagactgcggtcaaccaggtgttccacttcaatatccagcgcgaagacggcatcggcgtggaaatcgccctgcagtggaacgacagtttcaacgagaacctgttgtgcttcaccaacaacattcctcagcgtgacggcggtacgcacctggtgggtttccgttccgcactgacgcgtaacctgaatacctatatcgaagccgaaggcctggccaagaagcacaaagtcgccaccaccggtgacgatgcgcgtgaaggcctcaccgcgattatctcggtgaaagtgccggatcccaagttcagctcccagaccaaagacaagctggtgtcttccgaagtgaagactgccgttgaacaggaaatgggcaagtacttctccgacttcctgctggaaaacccgaacgaagccaagctggtcgtcggcaagatgatcgacgcggcacgtgcccgtgaagcggcgcgtaaagcccgtgagatgactcgccgtaaaggcgcactggatatcgctggcctgccgggcaaactggctgactgccaggagaaggaccctgccctctccgaactgtacctggtggaaggtgactctgctggcggttccgccaagcagggtcgtaaccgtcgcacccaggctatcctgccgttgaagggtaagatcctcaacgtcgagaaggcacgcttcgacaagatgatttcttcccaggaagtcggcaccttgatcacggcgttgggctgcggtatcggtcgcgacgagtacaacatcgacaagctgcgctaccacaacatcatcatcatgaccgatgctgacgtcgacggttcgcacatccgtaccctgctgctgaccttcttcttccgtcagttgccggagctgatcgagcgtggctacatctacatcgcccagccgccgttgtacaaagtcaaaaaaggcaagcaagagcaatacatcaaagacgacgacgccatggaagagtacatgacgcagtcggccctggaagatgccagcctgcacttgaacgacgaggctccgggtatctccggtgaagcgttggagcgtctggttaacgacttccgcatggtgatgaagaccctcaagcgtctgtcgcgcctttaccctcaggagttgaccgagcactttatctacctgccagccgtaagcctggagcaactgggcgaccacgcgcacatgcaggactggctggcccagtacgaagtgcgtctgcgcactgtcgagaagtccggcctggtgtacaaagccagcctgcgtgaagaccgtgaacgcaacgtatggctgccagaggtcgagctgatctcccacggcctgtcgaactacgtcaccttcaaccgcgacttcttcggcagcaatgactacaagactgtggtcaccttgggcgcacaattgagcaccctgttggacgacggcgcttatattcaacgtggcgaacgcaagaagcaggtcaaggaattcaaggaagccctcgactggctgatggctgaaagcaccaagcgccacaccatccagcgctacaaaggtctgggcgaaatgaacccggatcagctgtgggaaaccaccatggacccggcccagcgtcgcatgctgcgcgtgaccatcgaagacgccattggcgcggaccagatcttcaacaccctgatgggtgatgcggtcgagcctcgtcgtgactttattgagagcaatgccctggcggtctccaacctggacttctgattctggtagtctgctgaacccaaaaggccaacgctatgcgttggccttttttattgggtgaatatcggctgtctgctgaatgctccacgtggaacattctggtttttagccctgtggtgagggcaccgctacactttccaatcggtaaccgtacccatagatcgtcaacagctgccaccccctatccgcggtcagtcccaacttattacgcagtcgatagatgtgcgtatcgagcggccgcgacgacaccatttcttcgtgggtccaaaaccgctcatagagatactctcgggaaagcggtcgggccaggttggcaaacaagcaactggccagacggtactcgcgttcggtgaggttgatcggtttgcccgcccgggtcacggtcaactccgcatcatcaaaggtcaggtcgttgaagctctgcacttcatggttggctgatttctgcaggccgtggcgacgtagaaccgcagtcaccctagccttcagttcattgggacggaagggcttgctgacgtaatcatcggcaccactgttcagcgcagtgacgatatcgctctctgcatcgcggctggtcagcatgatgaccgcaggcggcgactccatgtgttcacgggtccagcgcaacagagcaataccgctgatatccggcaattgccaatcgagtatcaacaggtcgaaggtttcccggcgcagttggcgtagcaggtcttcaccgcgttcgaaacagtgcagggtccagggttgttcggcggtgctggggatttgtcgcagtgtctgttccacccgtcgcagttccgcgggttcgtcatccagtattgcgacacgcatgggtgggtcctttcttcttgaagagtacggcagccgtcagccgggttagtgatggcacgcactgcgcagatgccggtctctgaatctgaagaattgtgttcagatccgtcgaccccttggatctctcggtacgctggcatcaatgtgcgattaacccattgaaagtccttgataccgatgtgggaaagataccggctcccgcccataaggaaaaggatcagccgacgcatgcgctgccgtacactcctgcttgctggtgtcagataccttctggaacccaatcttgatgagcaccatgatcctttcttcgaaccgcctgtgccgcgccctaccctcattgttgatcatggctgtcggttctgcaggggcggttggcaagacgcgcgcgccttacattgatgatcacatactgtgtcacccccagcccctgccggcggtggttcagcatctcaccggggaagcctggaaaatcgataccaagggcgaggcgagccttttgctggaaggcatgaccattgacgaacaggagggtgtgaagacctcggcgtcggcgttcgtcagcctgttgctcggtgacggatcccgcgtggtgttgcccgcaagttcacaggttcgattgcatctggagcgcaagctgtcgattccccaggttgtactcgaacaaggtcaggcggaagcgtatgtgatcaagcgtgccagcgaccatgatcgttttcagatcgtgacccccgtgggggtgttgggcgtacgcggcacgcatttccgggtgcgtaacgacgctgagcaatcggtgctcgaagtgttggacgggcaggttgccgtcagccgcgaggcaaaaaaccagccgatggaacaggaggtaaaaatcggtgcccggcaaggtctgctgttcaggaagcagggagacctgaaaccggttgagctacttgctgcaccgaagctcgtgggtcaggacggccagaaaggcgatgcgccggtctggagcctgtaccttcggcctttgcccggagcccagcgataccgggcacaggtcgctaccgacaaagccttcatggacatcaagcatgaaaacttttccagttcgccgaaaatgagcttcactgggctcaaagcctcgttctaccacgtgcgcctttcggcctacgatgaaaacgggctggagggagagaccggggtctatgacatcttttactacccacccaccacccaggcacattgacctatgaagctctggggcaagaccgagaaacgccagcccacccatgcccagcgcctgtttcatggcctggtgcgcgagtggttgtggatcgggttgctattgctgcctgttaccgtctatctgtcgttgagccccggcctggcgttgaataatccgctgtacgacagccttcggcgccttaccccgctgcctgtagacccgcgcatcctgctggtgaccattgatgacgccagcctgaaaaagctcggccaatggccctggccacgcagcttgcacgccgacctgatcgaccgcctcagcgctgggcaaccggcgggtatcctcttcgatgtgatcttcagtgagcccggcgaccccgccaatgacaaacgcctggccgaagcggtatgcaatgccggcaacgttttactgccgctggtacgtgagggcactgctagttatagccagcccggtgggcagatgctggcgctgcatagatgcgccaagggcgtgggccacatcaatgtcgaagcggacagcgacggcgtggttcgcagcctgtatctgcgcgaaggacctcccgacacgacggcaccgcaactggcctggctggcctatgagatgagcggggagctatcggacatgccgggcgagccgcagcaggcgacttcacaacactggcaccgcgagcacgccatccgtatcacgtttatcgccccccatacccatttccccagcgtgtcctacgtcagcgtattgcgtggtgaggttcctcccgagcagctaagaggccgcttgatcctggtgggttcgacggcttccgggatgggggatcggttcgtcacccccctctcctccacggtcggtacaacggcaggggtggaaatccaggccaacgtgctcaacggcttcctccaaggccgcagcatcgtcgacctgccgggctggctcgcggcgctgatggcgacttctctggtggcgttgttgctgggcctgctgctctaccgcccgcgctatgcgctgtggatgactctgggctgtatggctgctgcgttacttggcgcctgggccttgttgcgccttggccactggtggtcgcccgccgcatgcctgattggtttgctgcttagctacctgatctggaactggcgtcgcctgagcgtgatcctcgcctacttcggctgggaactggcgcgcctggataacgaacccaaggtcctgcccgaacgccgccgtgcgcccgccagcaaaggcgacgtgctgcaggcgcggatctttgccctggagcaggccgtaagccgcacgcgcgatacacggcgcttcatggcagatgggttggagtgcctgccggtggcgacgctgatcaccgaccccaagggcaacatcctgctggccaaccgcattgcccgcgaagtgttcggcaatgacctggtcaccgaaaacctgctggagcaattggccgacctgggctacccgccgctgcacaatggcgtgcgccctgccctttcggcgctggaactggtcgagttccgcgacatccaccaacgcagcctgcgcatggaattggcgcccttgctgccggccgagggtgatgttgcactgggctggctgttgagcctcactgatttgagcaaggagcgcgaagcgcaacaacaccgcgaaaccatgttgcgcttcctttcccacgacctgcgtgcgccgcactcggcgatccttgcgctgctggatgtgcataacgacgagtccccggtattcgcccagatcgaacagcaggttcgccgtgccttgggcctcactgaatctttcgtgcaactggcgaaagccgaagctgacggttaccagttccagccgacgctgtttgccatgttggtgatggatgcattcgatcaggtggcgttgattgcccagctcaaggggatccacctggttcacgacctggatgaagctgacgagggcatggtctccgctgaccagtcgctgctcactcgggcgttgttcaacgtgctggagaatgccatcaagtattcgccctcgggcaccactgtcaggttgagacacagcagtgcacaaggttggttggaatgccgtatcagtgaccaggggccggggattgcagcagaggacttgccggagctgttcagccaataccggcgctttgaatcggcacagggcagtgaaggattggggttgggcctgacgatggtcaaggctgtggtagagcgccatggtgggcgcatcagctgcgaaagcgtggtaggcaaaggcaccacattcagcgtgcaattacccctgctggaagactgaaaaaacgtactttagtgttgtgaataaaaaaccggtcgcaaggaccggtttttttatgcagaaaaaacttatgcacctttttcttgattttatgggcttgagaaatatgcaataaaatcagcttgttatgattcaaaaagcgcaattcgccaacaaaccgtacacaggttatccacagatgctcagatcaccggagtgtcgaccacaacaggctctggcggcagcgaacccatggcccgttgctgcgcttcattccacgcctgggcgcggtcattcagcgcggcaatggcacgtgggccttcaccttctgcgtacatcggttcgccaatcaccacggtgatggtgccttcgcgcttggcccagccggtctttggccagaacttgccggcgttatgggcaatcggcagcacgggcaggttggcgttgaccgccaaagccgtacccccgcgtgagaacttgcctacggtgccgtagggcacgcgagtcccttccgggaagatcagtacccacacgttatccttgagcagttcatcgcccttcttggccacgtgcttgagcgctgccttggggttgtcgcggtcgatggcgatcggacgcaacatggccatggcccagccgaagaacggcacgtacagcagctcacgcttgagcacctggctcaggggcgagaagtacgccgagagaaagaacgtctcccaggtgctctggtggttcgacagaatcacgcaaggctggtccgggacgttttctgcacccttgatctcgaaacgaatattcagaaacaccttggtcagccacaacgcgcagcggcaccagtagacgttgataaagcgatagcgcgccttgaatggcaaaaagggcgcaataaaaaagctcagggtgcaccagagaaacgaactggtgcccaacagcaggtaaaagaagaaggttctgatggcctgcaaaatcgacatggcggcatttaccgttgcgggacaatgcccgcctgttaaaagcgcactcccgaacagtccttggtcaggaagtcgagggcggctagttgttgataagttctgcggcaacggccgccagatcgtcaaaaatcaaggtgcctaccggcaggtttttcgcctgggtcttttcgcctttcccggtcttaaccaaaactggctgagagtcgacggctttggccgcctccaggtcaccgagactgtccccgacgaaccatagcccagccaagggcaccttgtaatgttctgcaatggttttcaacatgccaggcttgggtttgcggcaatcgcagccctcatctggcccgtgggggcagtacaccaccagccccacctcaccgccctgctcggccaccaatgcgcgcaggcgtgcgtgcatggcgtccaaggtggcgatgtcgtagtacccgcgagcgatgccggactggttggtggcgatggccaccgtccagccggctttgctcaactgcgcgatggcctcgatggagccgggcagtggaatccattccgccaccgacttgatgtaagcgtcggagtcgtagttgatcaccccgtcccgatcgagaatcagcagtttcaccatggtcagctcagcgtcgaaatgtcagcgatattgacgaacaagccgcgcaggcgcgccagcatggcgtagcggtttttccgcacgccggcatcgtcggcattgatcatcacggcttcgaaaaacgcatccaccggctcacgcaaggtggccaggcgcgccaatgcttcggcgtagttgcgctcggcgatcagcggcttcaccgcgttttcggccttggcgatggccgagttcagcgagaactccttggcatcggcaaacaggccagggtcgacatcagcgttgcccaggccttcggccttgctcagcaggttcgacacacgcttgttcacagcggccagggcatcggcttccggcagcttgcggaaggcctgcacggcttgtacgcgctgatcgaagtccagcgccgaacccggctgcagggcacgtaccgacaggtacaccgacacgtccacgccttcgtcttcgtaacgcgcgcgcaggcggtcgaacacaaactccagcacttgctcggccaggccggcctgcttgaccttggcaccgaactggccgacggcaaacaccacggcctgggtcaggtcgaggtccagctttttgtcgatcaggatacgcagcacgcccaaggccgcacggcgcagggcatacgggtctttgctgccggttggcaacatgccgataccgaagatacccaccagggtgtccagcttgtcggcgatcgccacggctgcaccggtcagggtggtcggcagttcagcgccggcaccgcgtggcatgtactgctcgttcagggccagggccacgtcgtctggctcgccgtcgttgagggcgtagtagtaaccggcaacgccttgcatctccgggaactcgccgaccatttcggtggccaggtcgcacttggacagcaggcctgcacgtgcagcccaggcggaatcaccaccaatgcgtggtgcaatgtaggcggccagcttggaaacccgcacggccttgtcgtacacgctgccgagtttttcctggaacaccacgttctgcaggcgcaggttgaagtcttccagcttctgcttcttgtcttgcttgaagaagaactctgcgtcggtcaggcgcgggcgtacgactttctcgttaccagcgatgatctgctgggggtccttgctctcgatgttggccacggtgatgaagcgcggcagcaacttgccgtccacgtccagcaggcagaagtacttctggttgtcctgcatggtggtgatcagggcttcctgcggcacgtcgaggaaacgctcttcgaacgagcacaccagcggcaccggccattcaaccagcgcggtcacttcgtcgagcaggcttggcggcacgatggcagtgccttcctgcaagcgggccaattcctcagtgcgcttgctgatcagctcgcgacgttcgttggcatccgccagcacataggccgcgcgcaggtcgttgaggtagttggccggcgaagtgatgcgcacggcttctggatggtggaagcggtggccacgggaatcacggccggccttctgggcgaggatggtgcagtcgatgacctggtcaccgagcagcatcaccagccattgggtcggacgtacgaattcttccttgcgtgcaccccagcgcatgcgcttggggatcggcaggtcgttcagcgaatcttcaacgatggtcggcagcaggctggcggtcggcttgccggtgatgacctggctgaaccgcagtttcggcccgctctggtcgatctcactcagttccacgccacacttcttggcgaaacccagggcagcctgggtcgggttgccttcggcgtcgaacgcggcctggcgcggtgggccgtcaaggttgatgctgcggtccggctgctgggtttccagtgcggtcagcaacacggccaggcggcgtggcgcagcgtagacttttttcgcggcgaacttcaggccggcggtttgcaggcccttttcgataccggccatgaacgcatcggccagggtgttcagtgccttgggtggcagctcttcggtgcccagttcaaccaggaaatcttgagcactcattgtgcagcctccagcttagccaacacttcatcacgcaggtccggggttgccatcgggaagcccagcttggcgcgagccagcaggtaggcttgggcgacggaacgcgccagggtgcgtacacgcaggatgtattgctggcgcgcggttaccgagatggcacggcgcgcgtccagcaggttgaaggtatgggacgccttcaacaccatttcatagctcggcaacggcagcggctggtcgagttcgatcaggcgcttggcttcgctttcatagaagtcgaacagttcgaacagcttgtcgacgttggcgtgttcgaagttgtaggtggactgctccacttcgttctggtggaacacatcgccgtaggtgaccttgccgaacgggccgtcagcccacacaaggtcgtagaccgagtccacgccctgcaggtacatggccaggcgctctagaccgtaggtgatttcgccggtcaccgggtagcactcgataccaccggcctgctggaagtaagtgaactgcgtcacttccatgccgttgagccagacttcccagcccaggccccaggcacccagggtcggcgattcccagttgtcttcgacgaaacggatgtcgtggaccaatgggtccaggcccacatgcttgagcgagcccaggtagagttcctggaagttgtccgggttcggcttcaataccacctggaactggtagtagtgctgcagacggttcgggttttcgccgtagcggccgtcagtcgggcgacgactgggctgcacataagcggcgttccaggtttccgggccgatggcccgcaggaatgtagcggtgtggaaagtgccggcgcctacttccatatcgtagggctgaagtaccacacaaccttgctcggcccagtattgctggagggcgaggatcaagtcttggaaggtacgcacggctggcgtaggctggctcacgaaattcacctgttacttgggctgcgatttaaagagcgggagtatacccgattcggccccgccaccactccctggagccttatgccacgctgcttttggtgttctgaagatccgctgtacatggcttatcacgatcaggagtggggaacgccgctgcgcgatgcgcagggtttgttcgagttgcttttgctcgaagggttccaggcgggcctgtcctggatcaccgttttacgcaaacgcgagcattatcggaaggtcttgttcgggtttgatgcgcagcggttggcccaactgagcgacgccgagatcgatgcgctgatgctcgatccgggcatcgtgcgtaatcgcctgaaactcaatgccacccgacgcaatgccgcagcctggctggcgctggaggacccggtgggtttgctctggtccttcgtcggcggcaaacccaaggtcaatcacttcaaggaccgcagcgaagtcccggcgatcacggccgaggccgaagccatgagcaaagccttgaaaaaagccggtttcaccttcgtcgggccgaccatttgctacgccttcatgcaggcctcgggcatggtcatggaccacactcaggactgcgaccgttacgcggacttggtcaacgccggttagaatgcgcgctttgcgcaccacacacgatcaggagtgacctgtggaaaagtttaaaggcgccttgctggtaggcgctctgcggttgtttgcgctgctgccctggcgcgctgtccaggcggttggcacggccatcggctggatcatgtggaaaacccccaaccgctcccgcgacacggtgcggatcaacctctccaagtgcttcccggacatggatccggccgcccgtgaacggctggtcggccagagcctgatggacatcggcaagtccctgaccgaaagcgcctgcgcctggatctggccggcccagcgctccatcgacctggtgcgcgaagtcgaaggcctggaagtgctgcacgaagccctggcctcgggcaaaggcgtggtcggtatcaccagccacctgggtaactgggaagtgctcaaccatttctattgcagccagtgcaagccgatcattttctaccgcccacccaaactcaaggcggtggatgaactgctgcgcaagcagcgcgtgcaactgggcaaccgcgtggcggcttcgaccaaggaaggcatcctcagcgtgatcaaggaagtgcgcaaaggtggccaggtcggaatccctgccgacccggagccggccgaatccgccgggatcttcgtgccgttcttcgccacccaggcgctcaccagcaagttcgtgccgaacatgctcgccggccacaaggcggtgggcgtgttcctgcatgcgctgcggctgccggacggttcaggctacaaggtgattttggaagcggcgccggaagacatgtatagcaccgataccgccacgtcctgcgcggcgatgagcaaggtggtggaacgttacgtcggtgcctacccgagccagtatatgtggagcatgaagcgcttcaagaaacgcccaccgggtgaagagcgctggtactgattcaagatcaacgcaaaaccaatgtgggagggggcttgcccccgagagcggttgctcagtcaaataggtatcgactgacacactgccatcgggggcaagccccctcccacatttgaattgcgctcaggcttggcggtcgagttttttcaggaacacggtcatctctttctcggcctgcttatcgccgtgagcaagcgccgcttcgatgcccttctcccacgccagccgcgccgctgcacgatcttccagccccaactgcgccttgcccaacaacttccacgccgccgaatacttcgggtcgaactcgacgcacttgctaaaatgctccgccgccttggcgttgtccttcagatccagatagcccttgcccaaaccaaagcgcagcagtgagttatccacgcccttggcgagcattttttccagggattcgagcatgtcggccactccgttcgatcagaaaaaactcaaccccacgtggaacaacttctccacatcgcgaatatgtttcttgtccaccaggaacagaatcacatggtcacccgtggcgatcaccgtatcgtcatgggcgatgatcacctcttcgtcacggatgatcgcgccaatggtggtgcccggcggcaagccgatatcgcggatggccttgccgatcaccttgctcgacttcgagtcaccgtgggcaatcgcctcgatggcttccgccgcgccccggcgcagggagtgcacgctgacgatatcgccacggcgcacgtgggcgagcaaggtgccgatggtcgccagttgcgggctgatggcgatgtcaatatcgccgccctggatcaggtccacgtaggccgggttgttgatgatggtcatcaccttcttagcccccagccgcttggccagcagcgacgacatgatgttggcttcgtcatcgttggtcagcgccaggaagatgtcggcgtcggcgatgttttcttccatcagcaggtcgcggtccgaggcgctgccttgaagtacgacggtgctgtccagggtgtcggacaaatgccggcaacgtgccgggctcatctcgatgatcttcacctggtagcggctttcgatggcttcggccagacgctcgccgatctgcccgccgccggcgatgacgatgcgcttgtaggtctcatcgagacggcgcatttcgctcatgaccgcgcgaatattcgccttggcggcgatgaaaaacacttcgtcgtcggcctcgatcaccgtatcgccctggggcaggatcggccggtcacgccggaaaatcgccgcgacgcgggtttccacattcggcatgtgctcgcgcagctggcgcagttgctggcccaccagcgggccgccgtaataggcctttaccgcgaccagttgcgccttgccgccggcaaagtcgatcacttgcaaggcgcctggaatttcgatcaggcgcttgatgtagtgggtcactacctgttccgggctgatcagtacgtcgacgggaatcgcgtcgttgtcgaacagcccggcacgggtcaggtaggccgcttcgcgtacgcgggcgatcttggtcggggtgtggaacagggtgtgggcgacctggcaggcgaccatgttggtttcgtcgctgttggtcacggccaccagcatgtcggcgtcatccgcgccggcctggcgcagtacggtcgggaacgacgcgcggccttgcacggtacggatgtcgaggcggtcgccaaggttgcgcaggcgctcggcatcggtgtcgaccacggtgatgtcgttggcttcgctggccaaatgttcggccaacgtaccgccaacctgccctgccccaaggatgatgattttcatccggtcactcccttaaaaccattcagccgcgcgcggcggcgatcttgatcagtttggcgtagtagaagccatcgtgtccgccttcttgcgcgagcaactggcggccgtggggctgcttgatgccggccgtggtggcgaggtccagctcccgtgcaccgctggtgcgggcgaggaaggcttcgatcacctcggtgttttccgtcggcaaggtggagcaggtggcatagagcaggatgccgccgacttcgagggtcggccaaatcgcgtcgagcagctcgccctgcagcacggccagggcggcgatgtcatcggtttggcgggtgagcttgatgtccggatggcgacggatcacgccggtggcggagcacggtgcgtcgagcaggatgcgctggaacggtttgccatcccaccaggtggcggtgtcacggccatcggcggcgatcagctcggcgttgaggcccaggcgggcaaggttttcccgtacgcgcaccaggcgtttggcttcgaggtcgacagcgacgacaccggccaggtctttttcgacttccagtatgtgacaggtcttgccgcccggcgcgcagcaggcgtcgagtacgcgttggcccggcgccaggtcgagcaggtcggccgccagttgcgccgcctcatcctgcacgctgatccagccttcggcaaagcctggcaggctgcgcacatcggtggccgcttccagtacgatgccgtcgatgctgtatacgcacggtgtggcgttgaagccggcgtcggtgagcaatttcaggtaggcatcacggctgtggtggcggcggttgacccgcaggatcatcggtggatgcgcattgttcgccgcgcagatggcttcccactgttcgggccagaacgccttcagggatttttgcagccagcgcgggtgggcggtgcgcaccaccgggtcatgttccagctcggccagcagcgcttcgctttcgcgctgggcgcggcgcagcacagcgttgagcagggccttggcccacggctttttcagtttgtcggcgcaaccgactgtctcgcctatcgcggcgtgggcgggtacacgggtgtagagcaactgatagaggcccaccagcagcagcgcttccacatctgcatcggcggccttgaacggcttttgcagcaacttggctgccagtgcggacaagcgtggctgccagcgggcggtgccaaaggccaggtcctgggtgaaaccgcgatcgcggtcttcgaccttgtccagctgggtcggcaacgaactgttcagcgacgccttgccgttgaggacggcggcgagagccttggcggcggctagacgtgggttcattgggctgtcccgaggagggtgcctatagcaaatttctcacgacggctgttgaacaaatcgctgaaattaagcgctttgccaccgggtaattgcagacgggtcaggcacagcgcctgctcgccgcaggcgaccagcaggccgtccttgctggcgccgatgatctcgccgggagcgcctttgccctcgacgagtttagcggccaacactttcacggcttcgccattgagggtgctgtggcagaccggccaggggttgaaggcacgtaccaggcgctccagctccacggccgggcggctccagtcgacgcgcgcttcgtctttgttcagcttgtgggcgtaggtggccaggctgtcgtcttggacttcgcctgccagggtgccggcggccaggccggcgatggcctcgatcacggcgggcgggcccagctcggcgaggcggtcgtgcaggctgccgccggtgtcttcgccggtgatcggggtggtgaccttgagcagcatcgggccggtgtccaagcccgcctccatgagcatcacggtcacgccgctttcgctgtcgccggcttccaccgcgcgctggatcggcgccgcaccgcgccagcgtggcagcagcgaggcatggctgttgatgcagcccaggcgcgggatatccagcaccccttgcggcaggatcaagccgtaggccacgaccaccaacaggtccggcttcagcgccgccagttccgcctgggcgtcggcgttgcgcagggttggcggttgcagcacggggatgttgtgctccagcgccagttgcttgaccgggcttggcatcagtttttgcccgcgaccggccgggcgatccggctgggtgtacaccgcgacgatgtcataagggctggcaagcagggccttgaggtgttcggcggcaaattctggagtgccggcaaaaacaatgcgcagtggctcggtcatgggaggtctcggttaaaagcagtcacaaaagaaaaaggcttgccgcagcaagcctttggaagaagggcatcaagcttgctggcgatgctttttttccagcttcttcttgatccggtcgcgcttgagcgtggacaggtaatcgacaaacagcttgccgttgaggtggtcgcattcgtgctggatgcacaccgccagcaggccttcggcgatcagctcgaacggcttgccgtcacggtccagggccttgatcttcacgcgcagcgggcgctcgacgttctcgtagaactcgggcaccgacaggcagccttcctggtactcacccatctcgtcggtcagtggttcgaactctgggttgatgtacaccctcggttcgctgcgatcctccgacaggtccatgaccacgacgcgctgatgcacgttgacctgggtcgcggcgaggccgatgcccggggcttcatacattgtttcaaacatgtcatcgaccaactgacgaaccttgtcgtccactacggccaccggcttggcgatcgtgcgcaggcgcgagtcgggaaattcgaggatgtttaaaatagccataagcgtaattgctgcacatgtgaggtaaaggcaaatcggcgttgggatggacccagacagccggtgtgaaacgccccgaagccgcgaaggccctggcatttcacgcgaacgcacataataaaggagattcaccccatgaggaaatcgctactcgtcttgctgctgtgggccccgttcgccatggccctgctgccccagcccgtccagcgcctggatcaatcgacacaacaggccatccagcgctttttactgcacaaccgcattcttgattcgccacaggacctggacagcgcgccgtacattgttgccgctgatgcaggtcgagtgctgggggccaacggtgagcgggtgcatgccaggggcaacctggacccttcccaaccccattacggaatattccgacgcggcaaggcctacaccgatccgcagacccaagaactactgggcatcaacgccgacgatatcggcacggcccgtttcgtcacggctggcgacctcaccaccctggccgtgcagcgagtgacccaggaggtgcgcccgggtgaccgcctgctacgcgcgcaatctcctgtcgatccggccacccttgaggtcatttcagcggcacccttcatcgacgggcacatcatcgatgtccccaagggtgtcacccaaatcggcgtactcgatgctgtcatcctgaacaaaggccgccgtgacggcctggtcgaaggtcaactgctcagcgtgatcaaggctggcgcgaccgtgcgcgacagcctcaccggcacgccgacccgactccccgatgaacgcgccggcaccctgctggtatttcgcacctacgaaaagctcagttacggcctgatcctcaatgcctcgcgacccctggcagtgatggaccgtttcgagactgcgcatcaaacacaatgaataggttgctaaataagttaccaacagagttatccacagcttgttccggtcaaggatgatcaaatgaatccgataaacagtcatgaagtatccccgtcagaactggaagcccgactacgcttgcacaggctgccggaactgggccccaagcgttttcgcttattgatcgaagcgttcggctctgcgtcaaaggccatcagtgcccccgccagtgcctggcgttcgctggggttgccggccatcagcgccgatgcccggcgcagccatgaaatccgcgagggcgccagtgcggcattggcctggctggcttgcccagcccagcatttgctgatgtgggaccagccggagtaccccgcactgctcgcccagattgacgacgcaccgccgctgttattcgtcgctggtgaccctctgatcctggaaaaaccgcaactggcgatggtgggcagccgacgtgcatcccgtcctggcatggacaccgcagctgcgttttcccgtagcttggcgagcgcgggttttgtcatcaccagtggcctggccttgggtattgacggcgccgcccatcaagccgcattggacgtgggcggccagacaatcggcgtcctcggcaccgggctcgaaaatttttatccacagcgccaccgacggctggcggcggcgatgattgaccaaggcagcgcggtggtttccgagtttccgctggacgctccaccccaggccggcaacttccctaggcgtaaccgcatcatcagtggtctgtcccttggcgtattggtggtggaagccagcatggccagcggctcgctgatcaccgcaaaactggcggccgagcagggacgcgaggtgtacgcgattccgggctccatccatcatcccggcgccaagggttgccatcagttgatccgcgatggtgcggtgttggtggaaaccatcgagcacattcttgaaggcttgcgcggctggcaggcgctgtcccgtccggcgccgatgccggtgacccatccgctggtggcactgctgcatgcggcgccgcacaccagtgaagcgctggcgattgccagcgggcggccgttgtcccaggtgttggcgacgcttacggagctggagcttgagggccaggttatctgcgaaagcgggcgctggcttgcgcgctgctaggttttgtaacgaagatcggtaaactgcgcagagctttagtctggagagtgaataatggtcaaccggtggcgtgtgctggaaaccgcacgagaaattcgcgcaggcgcggtgattgcctacccaaccgaagcggtttggggcctgggctgcgacccgtggaacgaagaagcagtagaccgcttgctcgccatcaagaatcgctcggtggacaagggcctgatcctggtggcggacagcatccgtcagttcgactttctcttcgaagacttcccacaggattggatcgaccgcatggccgccacctggcccgggccgaatacctggctggtgccccatcaggacttgctgccggaatgggtgacgggtgtgcatgacacggtggcgctgcgggtgactgaccatccactggtgcgggacttgtgctcgctggtggggccgttgatttccacctcggccaaccctcagggtcgcccggctgcacgtacgcggatacgcgtggagcaatacttccgtggccaggtggacctggtgttgggcggcgccctgggtgggcgcaaaaaccccagcctgattcgtgacctggtgaccggcgaggttgtgcggccttcctgaaggaaggccacagggctgcttaaggcagcagaatggtcgaccccgtcgtgcggcgtgccgataactcggtctgcgccttggccgcttctgccagcgagtaccgctggttgatatcaatgcgcaccttgccgctcttgatcatcgagaacaggtcatcggccatcgcctgcaggttctgcgggttgttggcataggtcgccagggtcggccgggtgacatacagcgagcccttggctgacaggatccccaggttcaccccatccaccgcgcccgacgcattgccgaagctcaccaccaacccacggggcgccacgctgtccagcgaggtcagccaggtgtccttgccaacaccgtcatacaccaccggtacctttttgccgtcggtcaattccagcacacgctgtgcgacgttttccttgctgtagtcgatggtttcccaggcgccgagggatttggccagggcggccttttccggcgagctcaccgtaccgatcagcttcacgcccaaagccttggcccactggcacgccagggagcccacaccaccggctgcggcgtggaacaggatggtttcaccgcctttgagttcataggtctggcgcagcagatactgcacggtcaggcccttgagcatggcgccggcggcctgttcgaagctgatgtcgtccggcaggtgcaccaggttggcggcgggcaacacatgcagttggctgtaggcgcccagcgggccactgccgtaggccacgcggtcgccgaccttgaattgggtgacttcactgccgatggcatcgaccacaccggcgccttccgcgcccagccccgatggcaaggccggcggcgcgtacaggccgctgcggaaataggtgtcgatgaagttcaggccgatcgcctcgttgcgcacgcgaacctgttgtgggccaggctcggccggcgtgtagtccacatactcaagcacttcggggccgccatgggcgctgaactggatacgtttggccatctgcacttctccttaaggtcgaatcgcgtagccccctatcggactcctaagcttgatcttcgtcaactgcgacgtacgtgggtgcggtggtatcctgtgcgcccatttgccgccgacgcccaatggcctcgcgtagctttgcccgattcaaggtgatgccatgactacccgcaccgaggctgtaaaggcctacctgcttgacctgcaagaccgtatttgcagcgccctggaaaccttcgagacggacactcgctttatcgaagacgcctggacccggcctgccggcggcggcggtcgcacccgtgtgattgcaaacggttctgtcatcgaaaaaggcggcgttaacttttcccacgtctttggcagcggcctgccaccgtctgccagcgcgcatcggcctgagctggccggtcgcggtttcgaggccctgggtgtgtcgctggtgatccacccgcataaccctcatgtgccgacttcccacgccaacgtgcgctttttcatcgcagagaaagaaggcgaagagccggtgtggtggttcggcggtggcttcgacctcacgccttactacggcaacgaagaagactgcatccactggcaccgcgtggccgagcaggcctgcgcgccgttcggtcctgaggtgtattcgcgctacaaagcgtggtgcgacacttacttccacatcaagcaccgcaatgaaccgcgtggtatcggcggcctgtttttcgatgacctgaacgagtgggacttcgacacctgcttcgccttcatccgtgccatcggtgatgcctacatcgacgcctacctgccgatcgtgcagcgccgcaaggccattgcctacaccgagcaacagcgcgaattccaggaattccgccggggccgctacgttgaattcaacctggtctacgaccgtggcaccttgttcggcctgcaatcgggcgggcgtaccgagtcgatcctgatgtcgctgccgccgcaagtgcgctggagctacgactggaaggccgaggccggcagcgaagaagcacgcctcactgactacttcctgcaagaccgtgactggctgggccttgccgcgcccaaggcggttgtgtgatggaccgctatgtcgtgttcggcaaccccatcggccacagcaagtcgccgctgatccaccgcatgttcgccgagcagaccggcgagcaactggactacagcaccttgctggcgccgttggaggattttaccggctgtgcccgtgagttctttcggcagggccgtggcgccaacgtcacggtaccgttcaaagaggacgcctaccgactggccgacaccctcaccgaacgtgcccaacgcgccggcgcggtgaacaccttgagcaagctggcagacggcagcctgttgggcgacaacaccgatggcgccggcctggttcgcgaccttatcgtcaacgccgggttgagcctgcaaggcaaacgtatcctgctgctgggcgcgggtggcgcggtgcgtggcgcgttggaaccgttgctggctgagcaacccgcctcgctgatcatcgccaaccgcaccgtggaaaaggccgaactgctcgccgagctgttcgacgacctcggcccggtatccgccagcggtttcgactggctgcgtgagccggtggacgtgatcatcaacgccacgtccgccagcctgtcaggcgatgtaccgccgattgcgggcagcctgatcgagccaggcaagaccttttgctacgacatgatgtacgccaaggagccgaccgcgttctgccgttgggcgactgagcaaggtgcatccgtggcgatggatggcctgggcatgctggtggaacaggcggcggaagccttcttcctgtggcgcggcgtgcgcccggattcggcgcctgtattggctgaacttcgccgccagttgatctgacacggatccaaatgtgggagggggcttgccccctcccacattgttgatcgttttcagtcttggaactggatggggcaattgtcggccccttccagctttctcaactcttccaccacctgcggtctggcccggcgcagcgtcaaactgcgccctaacccacgcaagcgccgagcctcctggtgcagcatctccacccctgaatagtcgataaagttgatctgctgcgcctcgatcaccacgcgctcgccctgcagactttgcaggcgcacttgcaggtaatggctggccccgaaaaagatcgagccgcccacccgcagtacatcctcatcgccgtctcgccactgttgtacccgtggctgggaggtgcgcttgaggtagaaaaacagcgacgccagcaccccggcataaatcgccgtttgcagttccagcagcaaggtggccacacaggtcaggctcatcaccacaaactcggcgcgactgacgcgaaacaacgcccgaataccgcgacggtccaccagcccccaactgatcagcaggatgctcgcggccatgctcgggatcggaatgtgggcgatcagcgctgcgccaaataacgcgaacaatgccacccacaacgcggaaaacaccccggccaacggcgagcacgcgcccgcctcgtagctgaggccggagcgggtgaacgaaccggcggacaagtagccggagaaaaatccgcccgcgatattggatagaccctgcgcacggacttcctggttggcgtcgagcaattgctgtgagcgcgccgacaacgagcgggcaatcgacaggctggttaccaacccgagcatgcccaccgccacggcactcggcagcaggcgcaggagcaggtccaggtccatcggcagcgggctgaacggcggcagtttgccgacaaacgaactgaccagcgctacgtgcccgaacatcgccggccacagccacgccaccaggctgcccagtgccagcgcaatcaacagcgttggccagcgaggcaccaggtatttgagcagcgcgccgaccagcaacgtgccaagccctagcaggagggacgcatggtcccattcgccgctgtgatggatcagcgccaacaggctattgatggcggtggcctggcttggcagatccagccccaacaggttgggcaactggccgagggcgatcaccacggcggcgcccagggtgaagccgagcaccaccgagtgggagacaaagttcaccaacgcgccgaagcgcaacatgcccaacagccactggaaaacgccggcgaggaaggtcagcagcaggatcagggtgatgtagtcctgtgaccccggcacggccaatggactgacgctggcgtacagcacaatggaaatcgccgccgtgggcccgcagatcaagtgccaggacgagccccagaggcaagcgatcagtaccgggatgatcgcggcgtacaggccgtattcgggtgggagaccagcgatcagcgcgtaggcaattgactgtggcagggcgaggactgcgccgctgaggccgacgattgcatcccgaccgacgctggcgcgggtctggcgcgggagccaggcgaggaaggggaacagtgattggcggttgggccggggcatcgcagactcggtttagaggtttggcacagaatatcagtacacatcggttcctgtgggagggggcaagccccctcccacatttgaattgcatcaggcctcagagtctggctttaactgcagggagtgcgtctttgccgtccagtgtttttacaccctccagccacttatccaataccgccggattggccttgatccacgccttcgccgcatcggcattgctgactttgttgttggccacctcggccatgatgccgttctccatctcctgggtaaaactcaggttggtcagcagttttcctacgttcgggcaggcctgtgcgtaacccttgcgggtcaaggtatacacgctgccagtgtcaccaaagtatttctcgccacccttgaggtagcgcattttcaactgcacgttcatcgggtgtggggtccagccgaggaaggtgacgaatttctgtttcttcaccgctcgcgacacttcggccagcatcgcctgttcgctggactcgaccagcttccactggctcaggtcgaagtcgttcttcttgatgatttcctgcaacgagatattcgccggcgcgccggagccgatgccgtagatcttcttgtcgaacttgtcggcaaacttgttcaggtcggcaaaatcatgcaccccggcgtcccacacatagtccggcacggcgagggtgaactcggtgccgtcgaggtttttcgccaactgcaccacatcgccattggccacgaacttgtcgtagaagccctgctgcgccggcatccagttgccgaggaacacatccacctggccgtccttgagcccgccaaaggtgatcggcaccgccagggtgtccaccttcggtttgtagcccatgccggtcagcaggaaaccggtgatggcgttggtggctgcgatatcgctccagcccgggtcggccatttttaccgtttcacaactggcgtccgcgtacacgttggcgctggtcagtaccaacaggctcaacatcacagtcaacttttgcatggccttccctctgtatttattggttttggcagggttgtggaaaacgtgccttgcgctccaggtcgtcgaggtcgatatggttgcgcatgtattgctgactggcgtccaccagtggctggtgatcccagctcttcagcttgccctgggtgagtgcctcgaataccaggcgacgacggcgttggctggcgagcacctgttggtggatcgccgggatgtcccatttggcccgcgcctcagttaaaaacgcctcgaacagtggccggtgttccggtgactggctgaggttctcccgctcgtgcgggtcgttgtgcacatcgaacagtagacaagggtcgtcttcgctgtagatgaatttgtaggcgcctcggcgaatcatcatcagcgggctgatagtgccttcggccatgtattcgccgaacacttcgtcgtgcccgccctgcccttgcaagtgcggtaccagcgagcggccgtccagcggcaggcgtgggtcgagctcgccgccggccagttccaccagggtcggtagcaggtcggcggtggacacggcgtgggtcacgcggcccgccgcgaattgccccggcgcgctgatcaatagcggtacgcgggcggccatttcgaaccagtgcattttgtaccagagcccgcgctcgccgagcatgtcaccgtggtcgccagagaaaatgatgatggtgtcatcggccaagccggtgtcttccagggtctgcaggagcttgccgacattgctgtcgatgtagctgcacgcgccaaagtaggcacggcgcgcatcgcggatcttatccaccggcagcggcttgtcccacaggtcgtagaccttgagcaggcgctgggagtgggggtcgagatcgctttgcgcgggtgttgtaggcaacgggatatcagcgtcgtcgtacaggtcccagaacggcttgggaatggtgtacgggtcgtgcgggtgggtcatcgacaccgtcaggcagaacggttgttcgccgtcttcgcggatatggtcgaacaggtattgctgagccttgaagaccacctcttcgtcgaaatccagctggtttgtgcgcacgcacgggccggcttgcagcaccgacgacatattgtggtaccagctggggcgtacgtccggctcgtcccagttcaccgcccagccatagtcggcggggtagatatcgctggtcaggcgttcttcgtaaccgtgcagttggtcggggccgcagaagtgcatcttgcccgacagcgcggtgcggtagccgaggcggcgcaggtagtgggcgtaggtcggtacatcggcggggaaatcggcggcgttgtcgtaggcgccgatcttgctcggcaactggccgctgaccagggtgaagcgcgacggtgcgcacagcgggctgttgcagtacgcggcatcgaacaccacaccctgttcggcgaggcggctcaggttgggcaatttgatcggggaaggtccgtagaacggcagcatcggcgcggccatttgatcggccatgatgaaaagaatgttcttgcgcttcatgatctatcggcattccataggcggtgtttatgcgaatgagcatgcagcccatgaaaagtggggtaaagcccatgaaaagcaatgtctaggataagcaccgcttatgtatgaagcccttggcgacctgtccctcgatctgctgcgcgcgttcgaagcggcggcacgccaccgcagttttaccgccgctgcaatggaactgggcaccacccagcccgcgatcagccagcagatcaagcgcctggaagagcaactggcgatccgcctgtttgatcgcatctaccgtggcattgagttgaccgatgccggcgccctgttgttcgagcatgtgcagggcggtttgcagggcatcaaccagggactgagcctgatcagccagcaggatcagcatgaagtgctgcaagtagccaccgacttcgccttcgccgcctattggctgatgccgcgtttgcaccgcttccaccaggccaacccccaggtggacgtcagcctggtgaccagcgagcgcaaccacgcgaccttgcgcagcgatatcgacgtggcggtgctgtttggcgacggccgtttcaagcagggcgacagcctgtggctgttcaacgaggaagtgttcccggtgtgcagcccgcaatggctgaaggcgcaggccacgccgctgactgtacaaaatctgcatgattttccgctgctgcacctgcgccaggaaaacaacagccagtggttcgactggagcggcgtgtttcgcgaactgggcatcaccaccgcgcccacccccggccagttgcgcttcgataactacaccctgttgatccaggctgcgattgccggccagggcgtggccatcggctggcgccatctggtggacaacctgctggaacagaactggctgtgccggccggtgagcgacacggtgatctcacgtttcggctattacgtggtgcaaccccagcgcaaacgccgagggcagttggtggagcgtttcgtcgactggctggtggccgagcaggccagcagcgcacagtcactgaccgggctggccctgccgtcgattgcggtctagcatctggcgcatattggatccggagctcgtcatgcaacgtatcaagggctatcacgcccatatctacttcgacgcgaacactatcgaacaggcgcgcaccttgtgcgaagacgccgccaaactgttcccgctgcgcatgggccgtgtgcaccaacggccggtagggccgcacccggactggagctgccagttggcgttcgacccggaatacatcggtgtggtgctgccgtggctggtgatccatcgtaatggcctggtggtgttcctgcaccccgataccggcgatgacctgaaggaccacacggactatgccgtctggatgggggcgatgcgggagctgaacttgtcagccttttcttaaagttcatccctaaatatgggatagacatttatatattgagactttctgcttcgtaggtttatattcgctgcatccgctcagaactcaggtgaagcgatgcaggcgcaattgatcgcgctcgattggggaaccagctcccttcgtgcttataaactcggccccgctggcgcagtgctggaacagcgctcgctggcgtggggcatcatgcatttgcccaatgaaccccgggacattgctggcgtgcgttgcagcgatggcttcgagttggcgttcgatgcggcgtgtggtgactggctcgacgccgagcccggtttgccggtgattgcctgcggcatggttggcagcgcgcagggctggagcgaagcggcttatcgcaatacccctgtcgatgtcgccagcctcggccaggcgctgcataaggtgcgcagcctgcgtggcgtggacgtgcatatcgtgccgggcgtgatcgagcaggtcggcttgcccaacgtgatgcgcggcgaagaaacccaggtgctgggcgtgttgcaggggctgggcaccgacgcattgatcggcctgcccggcagccattccaagtgggtggaggtggtcgatggctgcatcacccacttcgacaccttcatgaccggcgagctgtttgcggtgttgagcaagcacagcatcctcggacgtacccagcaacaatccgcacaattccaggccgacgcctttgaccgaggcgtgcaggtggcgctgtccaaagacggccagcgcggcgtgctgtcgacgctgttcagtgcgcgcaccctgggcctcaccgccgaactcagccccgaacagcagcccgattacctctccggcttgctcatcggccacgaactcgccggcctgcccggcagtgcccgacacaagccgatcatcctggtcggcgccgggcccctctgcgcccgctatcaacgcgccctcgccctctgcggtttcgcccacgtcagcctggcgcaagaagccaccgagcgcgggctgtggcaattggcgatggcgtccgggctcactcaacctgtattggaggcctgacatgctcaagcacgcactcgcgcaaaacggtttgatcgccatcctgcgtggcattcgcccggacgaagccgaggccgtcggccaagtgctgtacgaggcagggtttcgggtgatcgaagtcccgctgaactcgcccgacccttacaccagcatccgcaccctgcgcgacagcctgcccgccgattgcctgatcggcgccggcacggtgttgctgcctgagcaggtcgagcaggtgaaggcggccggtggccaggtgatcgtgatgccccacagcgatgccaaggtgctgcgagcggcgaaagccgcaggcctgttcctgtcgccaggtgtggcgacaccgaccgaagccttcgccgcactggccgagggggctgatgtgttgaaactgttccccgccgagcaaatgggcccggcggtgatcaaagcgtggctggcagtcttgccggctggcaccttgctgctgccggtcggtggcattaccccggacaacatgcaggtgtttatcgatgccggtgccaaagggttcgggctgggttccgggttgttcaaaccgggtatgacagtggatcaggtagcgagccgtgcccaggcttatgtcgccgcctggaaagccctgagctgacatcaagttccgcgcccttggcgccgcatctataagagagacaagagatgaaaattaccaaactgacgacctttatcgtcccgccgcgctggtgcttcctcaaggtcgagaccgaccagggcgtgaccggctggggtgagcccgtggtcgaaggccgcgcccataccgtggcggctgccgtcgaagagctgtccgattacctgatcggcaaagacccgcgcaatatcgaagacatctggaccgtgctctatcgcggcggcttctatcgcggcggtgcggtgcacatgagcgccctcgccggtatcgaccaggcgctgtgggacatcaagggcaaggccctcggtgtgtctgtcagtgatctgctgggtggccaagtgcgcgacaagatccgcgtgtactcgtggatcggtggcgatcgcccggccgacaccgcccgcgccgccaaagaggccgtggcccgaggctttaccgcagtgaagatgaatggcaccgaagaactgcagttcgtcgacagcttcgagaaagttgacctggccctggccaacgtcgccgccgtgcgcgatgcggtcggcccgaacgtcggcatcggcgtcgacttccatggtcgggtgcacaagccgatggccaaggtgctgatgaaagagctggacccgtacaaactgatgttcatcgaagagccggtgctcagcgaaaactacgaggcgctcaaagagctcgcgccgctgaccagcacgccgattgccctgggcgagcgcctgttctcgcgctgggacttcaagcgtgtgctcagcgaaggctacgtggacatcatccagcccgatgcttcccacgcgggcggcatcaccgaaacccgcaagatcgccaacatggccgaggcctacgacgtggccctggccctgcactgcccgctgggcccgattgccctggcggcatgcctgcaactggatgcggtctgctacaacgcgtttatccaggagcagagcctgggcattcactacaacgagagcaacgacctgctcgactatgtgcgcgaccccggcgtgttcgactatgaccagggcttcgtgaagatccccaacgggccgggcctgggcatcgagatcaacgaagaatacgtgatcgagcgcgcggccatcggccaccgctggcgcaacccgatctggcggcatgccgacggcagcttcgccgagtggtaagcaccctgtaggagccgggatgccggctcctgcaagccctcaataaacataagaagaggcaacccccatgcaccctgaatccttcaccgggcaggcttctttagtcacgcctaccaaaaagcgttttttcatcatggtgctgttgttcatcaccgtggtgatcaattacctcgaccgcagcaacctgtcgattgccgccccggcgctgaccagcgaactgggcatcgacccggttcaggtcgggctgatcttctccgcgttcggctggacctacgcagccatgcagatccctggcggctggctggtggaccgcgtgccgccgcgcattctctatacggctgcgctgatcctgtggtccatcgccaccgtgatgctaggtttcgctgccagctttatcgcgttgttcgtgctacgcatggcggtgggtgccctggaagccccggcgtatccgatcaacagccgcgtggtgaccacctggtttcccgagcgcgaacgcgccacggcgattggcttctatacctccgggcagtttgtcgggctggcgttcctcacgccggtactggcctggctgcaacatgctttcggctggcacatggtgtttgtcgttaccggtggcgttggcatcctgtgggggatcatctggtacgcggtgtaccgcgagcccaaggacttcaaaggcgccaacgctgctgaaatcgagctgatccgcgaaggcggtggcctggtggacatgcaggaaaaagccgccaaggcaccgttcagttgggtcgacctggggatcgtgctgagcaagcgcaaactctggggcatctacctggggcagttctgcctgaactccacgctgtggttcttcctgacgtggtttcccacctacctggtgaaatatcgcggcatggacttcatcaaatccggcctgctggcatcgttgccgttcctcgcggcgtttgtcggcgtgctgtgttccgggatcttttccgattggctgattcgtcgcggcgcatcggtggggtttgcgcgcaagttgccgatcattggcgggttgctgatctccacggcgatcatcggtgccaactatgtggactcgacggcctgggtgattgcgttcctggcggtggcgttctttggcaatggcctggcgtcgattacctggtcgctggtgtcgaccctggcaccggcccgcctgttggggctgaccggtggggtgttcaacttcatcggcaacctgtcggcgattgccacgccgattgtgatcggctttttggccagtggcgattcgtttgcgccagcgattacctacatcgcggtgctggccttgctcggagcgctctcttacgtgttgctggtgggtaaggtcgagcggatcgagttgtaaaaaagggcgaccttgcggtcgccctttttcctttcggctcagggcaccgacatctcgttacggaacacattcagcgggtcccagcgctgcttggtgcggcgcaggcggctttcaatcatgaggtcagggaagaacaccttgtaccactgcgggttgggccccttgttggggtcgccgtcgataaacagcatgtcgcggtcggggtaattgatgtagcacccttcgaactgggcattgaccggaacgccgttgtcgttggcaaatgccgcgaaaaacagtccctggatccattgcgcgtgggcttgatccgaagcgctgctttcgtcacgccagtagcattgtggttgccacttcaagtaggacgaacgctgtgcaaccgatgattcccgtcgcacggcggcgctggcctgattgatttgcccaccgaatgactggatctggatcaggctttgagtcagccgcttatcggggtcgtcccacgtcagcgtgtcccagatcgcctgcagcacagtgggggtgaaaatacccttctggtaggccgacttgtaccgaccacgctggtttggccctgagccattgagcgtctgctggcaatgcagccaatccattcgacgcgtcgcggccagggcagacgccagtgaattgatcgtcggccctggcgggttgctgcgtggcaggtgggtcgttggggaaggactcaggcattcggtagcggaaatgccgatggcattgagcatcgagctgacaaagtcctcaaagggggcttgatcattcaactcgccctgcttgtccacgtaatgaacatccatcgtgacgttgccagtgttctgatggcgcatctccagtttggttgccaggccccaggtgtccgggtttgcctggttgcgggcaaaccagtcctgataggccaccagcaatctgtcgagggctggcttggtcagcagcgaccagtcccactccagcaccagccacagcacttccttgggggcttggggcaaacgttcgaagtagtagctggtaataatcccgaactgcccgccgcctgcgccgcagcaggcggcgaacagatccagttcgtcctgttgggcgctgttgcgggcgacatgtacagggaccaggccgttgccttgggcgttcggcaccagcatgtcgacgccactcaaccaatcgcacaccaggccatccttgcgcgacagcagcccgtagccaccgccgcaaatatgcccacccagcccgaccgaatagcacgagccgccgggcaagctcgtgttggccagcttgtacagcgccacataggcatcccagttctggccgcccgcctccaggcgatagctgtagcgatgaggcgaggtgggcaccaactccgaggcaatctgccccgtggcgtcgtagaccacttggttgagttggctgatatccaggatcgagagcacttcgtcgggactgtcgggcatcttgttcgcgacaaagccttcatagcagtgaccgccgctacgcaccgtgatccggccattggggatcgccagcgcctgggcggcggcgtcgatgatgtcctgggggctatagcagaggtaaatcaagttggcgccacttgacgaagattcaccctgcacattgcccaatggccagcgcaggttgaaacctttttgcagtgttgaatgacgacggtccgcagcggtaaggagatcaaatgccatgatgtactccaaagagccaagaatgacttctgatgcggctaacttaacgaccgggagggcaaggaatgcggggcttgcgcaggcggttagacggcaataggcatgaagtgcgttgagggaggacgcaatgtccaccctcaagcctagcggaaaaaggtgaaggcgccggggggttagttgagtacgccgtcgaggatctcgtagacgatgcccgtgcccaccgcgatcagcaccacatccggccccgaacggcgccactcataacccgggtacaccggcaggcgcgcgagggcgcggttgtctaggcgttcgccgtagtaaccacggggcaacggctggccacgtaccaggcgtacattgggcggcggcggtgcgccacgggagaactggccgtggttgtcatggatgatctggcgtaccgggccgaagtcctggggcgggccgccgcgacggttgtcctgcgggccgcgatggtcgtcgccatgttgctcgtgctggccttgcgggccgccacggtcggggccgccttggtcataaggcgcggcttgcaccagcgcgctggcgccaagcaccagtacgccaaggcctgcaatcacggatttgggcattttcatcgggtattcctcagggcacgcaaacaaaaaagggacttcgaacgaggttcgaaatcccttggtcttgctgtttaggccgtgcccgcgcgggttgattcctctgtatcaggaactttacctactgcttacggggcccttacttacgggcgttacgcacgccttccgacaatgccgcacacaggctcaacacgccgtcgatggcttgctggtcattcttggcattggcaatgtgatcgatcagcgccgaacccaccaccacaccgtcggccaggcgggcgatggccgccgcttgttccggtgtacggataccaaaaccgatgctgatcggcaggtcggtgtggcgacgcaggcgggtcacggcttcttcgacgtgttccagggtcgccgcgccggcaccggtcacgccggcgaccgacacgtagtacacgaagccggagctgccgttgagcacagtgggcaggcgcacatcgtcggtggtcggggtggtcaggcggataaagtcgatgcctgcggcctgggccgggtcgcacagctcgccgttatgctcgggcggcatgtcgaccacgatcaggccgtccaccccggcttccttggcgtcggcgatgaactgcggcacgccgtatttgtggatcgggttgaagtagcccatcaacaccagcggcgtgtcgttgttgtccttacggaactcgcggaccatctgcagggttttcaccaggttctgcttggcattcaacgcacggatgttggccagctgaatggccgggccgtccgccatcggatcggtgaagggcatgcccaactcgatcacatcggcaccggcggctggcaggcccttgaggatctccagggaggtgtcatagccagggtcgccagcggtgacgaaggtcaccagggcggcgcggttttgttctttcaactgagcgaagcgggtgtgcaggcggctcatcagtgtttctcctgctgggactgttccatatggtgcatgacggtctgcatgtctttgtcgccacggcccgacagattcaccaccatcagatgatccttcggcagggtcggggcgcgcttgaacacttcggccagggcgtgggcgctttccagggctggaatgatcccttccaggcggcagcatttgtggaaggcgtcgagggcttcgtcatcggtcaccgaggtgtactggacgcggccgatgtcatgcaaccaggcgtgttccgggccgatgccggggtaatccaggccggcagaaatcgagtgggcgtcgatgatctggccatcgtcgtcctgcagcaggaaagtgcggttgccgtgcagtacgcccggtacgccaccgttgaggctggcagcgtgcttgccggtctcgatgccgtggccggccgcttcaacgccgatgatctccacgctggtgtcatccaggaacgggtggaacaggcccatggcgttggagccaccgccgatgcatgccaccaggctgtccggcaggcggccttcctgggcttgcagttggtcgcgggtttccttgccgatcacggcctggaagtcgcgcaccatggctgggtacgggtgcgggccggccacggtgccgatcaggtagaaggtgctgtcgacgttggtcacccagtcacgcagggcttcgttcatcgcgtccttgagggtgccggtgccggcgaccactgggatcacttcggcgcccagcagcttcatgcggaacacattggcctgttggcgctcgatgtcggtggtgcccatgtagatcacgcattgcaggccgaagcgcgcggccacggtggcggtcgccacgccgtgcatgccggcgccggtttcggcgatgatgcgttttttgcccatgcgccgcgccaacaggatctggccgatgcagttgttgatcttgtgtgcgccggtgtggttcagctcttcgcgcttgaggtagatcttggcgccgccacagaactcggtcaggcgctcggcgaaatacagcgggctcggacgaccgacgtaatcgcgctggaagtaggccaattcctcgttgaacgccggatcgatcttggccgcttcatattcgcgggccaggtcgaggatcaacggcatcagggtttcagcgacgtaacggccgccgaacgcgccgaacaggccgttggcgtctgggccgttgcgtagatcggtctgggactgagtcatgggacactccaggagagaatgggtgtgggaagcaatgacggccactctacccctgacgtcctgcgctgaaaaccgataagatcgccgcaacctgtcaggaaaactcacagatgagccgagaccttccacccctcaatgccttgcgtgcctttgaagccaccgcccgcctgaacagcgtcagccaggcagccgagcaattgcatgtgacccacggcgcggttagccggcagttgaaggtgctggaggaacacttgggcgtgagtttgttcgtcaaggaagggcgcggccttaaactcacagatgcgggcgctcgtttgcgcgacgccagcgccgaggcgttcgagaggttgcgggatgtgtgcgccgaactcacccagagcggtgccgacgcaccgttcgtgctgggttgctcgggcagcttgctggcgcgctggctgatcccgcgtctgggtcgtttgaacgcggacttgcccgacctgcgcctgcacctgtcggcgggtgacggtgaccttgacccccggcgccccggcctggatgccttgctggtgttcgccgagccgccctggcctgcggatatgcaggtgtatgaactggccagcgaacgcatcggcccggtgatgagcccgcgtttcgctggctacgagcggctgcgccaggcgcccgcgtcggcgttgtgtggcgaagcgctgttgcacaccacctcacgtccgcaagcctggcccagttgggcgcggcaacacggcatcgaacccggcgcgttgaaacacggccaggggtttgagcatttgtattatttgctggaggcggcagtggccgggctgggcattgcgattgcgccggaaccgctggtggtcgaagacgtgcgcgcgggtcgcctggtggcgccatggggtttcagtgaaaccccggcgcacctggcgttgtggctacccaagcgcgccgcggacgggcgcgccgggcggttggcgcagtggctcaaggcagagctgttgcgccagccggtttagtcaccgcgcttgcacagcaggtaggcggccagcaggcccagtgcgcctacggcaacaccggctgtagtccatgggtgctcttgggcgtagtcccgggtagcaacaccggtttcgcggattttgactttgctttcttcgtaggcatcgctgatcaggtggcgggaatgcttgagggcattctcggcattgcttttcagggccttcaaggttttgcgcgattcgtcagacgcatcgtccttgaggctttccagagacttgagcaggctcgaaatctcggcttccatgctttccagcgacgctttgcgtaaagaagtgttggccatgtggactctcctgaagtgattgagtggcgtgtgtagataccgactgcggccgtttcagaaagtgcagttaatctgaactttcaggtaggaatggtcgccagaagcagtacgaacattgactgctacgcttgcttaacgacccttaggagaactgccatgagtgatcatcacacctacaagaaagtcgaattggtcggctcgtcgaccaccagcatcgaagacgcgatcaacaatgctatcgctgaagccaacaagagcatcaagcatctggagtggtttgaagtgactgaaacacgcggccatatcgagaatggcaaggtcgcgcactatcaggtcaccctcaaggtagggttccgaattgccagtagttgatcgcaacggttgaacttgctgactggccgattgccataacctgcgctacaaccaatgggtgccgatgccgcaagcgtcggcacgctctttttgatcagcgcaaggaaagtaacggatgaagaagttcctgttagcggtaggtttgttgagcattgccggcacagccctggcggcgggcaagccttgtgaagagctgaaaagcgagattgcggcgaaaatcgacgccaggggcgcttcgggctattcgttggaagtggtggataaaggcgcttctaccgacgctaaagtggtcggcagctgcgaaggcggcaccaaggaaattgtctacaagcgcggttaatcccgtgttccagacataaaaaaccgacgcgagtgcgtcggttttttttcgcttgagggtttcagcccttcatcaactgcgccagcaactcgtaggaatgaatccggtcggcgtgctcgtacaggtcgcaggtaaagatcagctcatcggcgccggtttgttcgatcagcacctccagcttggcacggatcttcgccgggctgccgaccatggccaggccgaggaagctgccgaccgcgtctttttcatggggcagccacaggccatccatggttttcaccggtgggcgctgcaccaggctttgcccgcgcatcagggcgaggatgcgttggtagaccgaggtggcgaggtagtcggcttgttcgtctgtgtctgcggcgaccagcggaataccgagcatcacgtagggtttgtccagcacggccgaaggcttgaagtgattgcggtatacgcgaatcgcctcatgcatcaggcgcggtgcgaaatgcgaggcgaaggcgtagggcaaaccgcgttcgcccgccaattgcgcgctgaacaggctggagcccagcagccacaccggtacgttggtgccggtaccggggacggcgatcacccgttggtcgggggtgcgtgggccgaggtaggccatcagctccgccacatcttcggggaaatcgtcggcactgcccgagcgctcacggcgcagggcgcgggcggtcatctggtcggagccgggcgcgcggcccaggcccaggtcgattcggccggggtagaggctttccagggtgccgaactgttcggcgatcaccagtggcgcatggttgggcagcatcacgccgccggagccgacgcgaatcgtcgaggtgccgccggccaggtaacccagcagcaccgaggtggccgaactggcgataccgtccatgttgtggtgttcagccacccagaaacggttgtagccgaacttttccacgtgttgggccaggtccagggaattgcgcagcgactgcgccggactgccgttggcgcgcacgggcaccaggtcgagggtcgagaactttacgtcggacagcgatttcataagcctgcttctccaaaagggccgcaggctttttagacgaaccaaaacctgccgcttcatgtgcatgctctatgcaatgagggcatatacccgagattcaatagcagcccaggaaatttcctactgaatcgctaggtttctcttacaagatgaactttgccgggccgactatcctcagaacccttactgacgcaaaaccaccgttcgaggagaccgctatgagtatcgttaaaaaagcatccgcgcattgggaaggtgacctgaagactggcctgggctccatttccacggaaaccggcgtgctgcgtgaagcgccttacggcttcaaggcccgtttcgagggcggtaagggcaccaacccggaagaattgatcggtgcggcccacgccggctgtttctccatggcgttttccatgattctcggcgatgccgggctcaaggctgacagcattgacacccaggccgaagtgaccctagaccaggttgacggtggttttgcgatcaccgctgtgcacctggtgctcaaggccaagattccgggcgcgagccaggcgcagttcgatgaactgagcaaaaaagccaaggaagggtgcccggtgtccaaagtgctgaacgcgaaaatcagcctggatgccaccctggtcagctaacgcagcaggtccaatgtgggaggggcggtgcgacgattcgacttgcccccgatnnnnnnnnnnnnnnnnnnnnnnnnnnnnnnnnnnnnnnnnnatcgggggcaagtcgaatcgtcgcaccgcccctcccacatttagttctgcgttagatcagaactcgtgttttgtcagtgtggtcctattaccatgcagcctaggcgcacactcgtgcgcagcgcattcagggagcttcacacatgaaacgttttgccttggcaatcatctgcggtgtattggccacgtcggctgtggccgcgccaaaagactgcgaagagctcaggaaggagattgaggtcaagatccaggctaacgcggtgccgtcctacaccctggagatcgtcagcaaggaagaagccgacaagcacgacagcgccatggtggtcggcagctgtgagaacggcaccaaggccatcgtctaccagaagaacaacgactgatcagatgcagttgacgctgcgttcttctgcgagcaactgacgcgccgagtcatacaaccggatgttgggtgtgaaggccagcgagcgcccttccagcacatagcgctggccggcctggaagtggtcgtattccagggtcatgaagcaggtgcggtacatcatctggctgagcccacccaaaccgccgccggcggggacttcaaagtcgaaacgcaccatcagttcatgatggccgggcggcatttggaagaaacgtccgtcatccaggttcttgccgtccaagcgttgcgccattaccagcttggaccccggcgtcggcgtggtgaaatcaacccacgcctgctgcgggtctgccggtggcaccggggtggtggtgcaggcactgaggaacagggcggcgacgggaaaccagagctgacgcatggcaggcactcacgtaggaaagagttcagcctgatgccagcggcgacagacttcttgtaagtataaacacgtcgtgccatggaaaaattccgcctgggcgcgatagtctggcgagcaaattacccaggagcggtcggggcatggtcaggcgttttcttccagggttgatggttgtgctgctcagcggctgttccagtgtcagttattacggtcagttggccagtggtcaatggcaattgctgcgcgcccgggagccggtggcgcaggtgatcgctgacccttcccgcccagtgctgttgcgcgagcatctggcgcaatcgcaaaaggcgcgtacgttcgccagtgaacacctgcatctgcctgacaaccagagctacaggttgtatgccgacatcggccggccttatgtggtctggaatgtcttcgccacgcaggagttttccctgtctcccgaaacccattgcttccctatcgcgggctgtgtggcctatcgcggctactacaaccagggcgcggcgcgtggtgaggcggcgttgttgaagcagcgaggcatggacgtgtcgatcggcggtgtcgaggcctattcaaccttgggctggttcaacgacccgatcatgaattcgatgatgaactggggtgatgagcggctggccacgttgatcttccatgagctggcgcaccagcgtttctatgtgaaggacgacaccgagttcaatgagtcgtttgccaatttcgtcgagcaggaaggcacgcgccagtggcgtgctgcacggggcttggcgccgcagagcctgtcggcgtcgaagcagcgtgatgagttcattcagctgatcctcgatacccgccagcgcttggaaaaactctatgcccaacccttggcaactgatgtgatgcgccaggcgaagtcggccgagttcgagcgtctgcgtcgcgattaccggcagctgcgcgacagccagtggggcggggacaaacggtatgacgcgtggatcaaccaacccatgaacaatgcgcggttgctaccgtttgggctgtacgaccagtgggtgccggcgtttgcggcgttgtttgcgcgggaaggtggggattgggtgaggttttataaggcggtggagaagctgggtgggttgccggtggtgcagcgcaaggcggcgttgaggcagttggaaaggggtgctctttagggcctcatcgggggcaagtcgagtcgtcgcaccgcccctcacacattttgaccgtgtgcgccggtcaattgtgggagggggcttgcccccgatggcggtctcaaagtcgctgcaaaaacgcctgatgcatctgatccagcgtttcaaaatgccaggtcggcgcctcggcattcagttcctcgaaactaccaaacccataccccaccgccgccgaatccagcccattcttgtgcgcgccgatcaggtcatgcttgcgatcaccgatcatcaaggtggtggccgggtccaggccttcctcgctcatcaggtgggcaatcagttcgactttgttggtgcgcgtcccgtccagctcgctgccgtagatcaccttgaagtgcttggcgaaatcgaagtgccgggcgatttcgcgggcgaagacccagggcttggaagtggcgacatagagctggcggccttgaccgttcaacgcttccagcagcggcatcacgccgtcgaacacacggttctcataaagcccggtgaccttgaaacgctcgcgatagaaattcaccgcttcccaggccttggcctcgtcgaagccgtagaactgcatgaacgcttgcagcaagggcgggccgatgaagtgttcgagtttggtcaggtccggctcgtcgatccccagcttgccgagggcgtactggatcgagcgggtgatgccctcgcgtgggtcggtgagcgtgccgtccaggtcgaacaggacggtttggtaaggcagggtcatcggtcgaatccttcagccaggtgcaggtctttgagcttcacgtagttcgcggcgctgtaggtgaaaaaggcgcgttccttgtcagtcaatgggcgaatctgtttgaccgggctaccgacatacaggaagccgctttcgagtttcttgcccggcggcaccaggctgccggcgccgatgatcacgtcgtcctcgaccacggcgccgtccatcacgatgctgcccatgccgatcaggatgcggctgccgactgtgcagccatgcagcatgaccttgtgggcgacggtcacgtcgtcgccgatcagcagcgggaaaccgtccgggttgaacggcccggcatgagtgatatgcagcacgcagccatcctgcacgctggtacgcgcaccgatgcggatgcggtgcatgtcgccacggatcacggtcagtggccagaccgagctgtcggcgccgatttcgacatcgccgatcaccaccgccgaaatatcgacaaaagccccggcgcccagggctggcgtgtggttctgataggtgcgaagggtcacgatagcctctctctcttctgctgatagctgcggtgggcgttgattgtaattaagatggccccatctttgttcttacatgtttcttcagccaaggtgcccaccgtgagcgcgaacaaccctcttctgcagtcctacgacctgccgccgttctcggcgatccgtgccgagcacgtccagccggccatcgaacagatcctcgccgacaaccgcgttgccatcgaaggcatcctgcaaagccagggcaaaaatccgacatgggccggtctggtcctggcgatggacgaactgaatgaccgcctgggcgccgcctggagcccggtcagccacctcaacgccgtgtgcaacagcgctgaactgcgtgaagcctacgaaagctgcctgccggcattgagcgcgtactctaccgagatgggccagaaccgcgcactgttccaggcctttgaagccttggccaatagcccggaagccgccggtttcgacgtggcgcaaaaaaccatcctggaacactccctgcgtgacttccgcctgtccggcatcgatctgccgccagagcagcaaaaacgctacgccgaagtgcagagcaagctgtcggagctgggcagcaagttctccaaccagttgctggacgcgacccaggcctggaccaaacacgtcaccgatgaagccaccctcgcgggcctgaccgactcggccaaggcgcagatggccgccgccgcccaggccaaaggcctcgacggctggctgatcaccctggaattccctagctactacgccgtcatgacctacgcccaggatcgcgcgctgcgtgaagaagtctacgcagcctactgcacccgtgcgtcggaccaaggcccgaatgccagtcagaacgataacggcgcggtgatggaacagatcctcgacttgcgccaagagctggctcagttgctgggttacgcgtcgttctccgaactgagcctggccaccaagatggccgagtccagcgaccaagtgctgagcttcctgcgtgacctggccaagcgcagcaagccgttcgccgcccaggacctgcaacagctcaaggcctatgctgccgaacaaggctgcgccgacctgcaaagctgggacagcggtttctacggcgaaaaactccgcgagcagcgctacagcgtgtcccaggaagccctgcgcgcttacttcccgatcgacaaagtgctgggcggcctgttcgccatcgtgcagcgcctgtacggcatcgagatcgccgagcagaaaggcttcgacacttggcacccggatgtgcgcctgtttgaaatcaaggaaaacggccagcacgtgggccgcttcttctttgacctgtatgcccgtgccaacaagcgcggcggtgcctggatggacggtgcccgcgaccgtcgccgcacaatcgacggcgccctgcaaagcccggtggccaacctggtgtgcaacttcaccccggccgacagcggcaagcctgccctgctgacccacgacgaagtcactacgctgttccacgaattcggccacggcctgcatcacctgttgacccgtgttgaacacgctggcgtgtctggcatcaacggcgtggcctgggatgcggtggaactgccgagccagttcatggagaactggtgctgggagccggaaggcctggcactgatatctggtcactatgaaaccggcgagccgctgccccaggacctgctggaaaaaatgctcgcagcgaaaaacttccagtccggcctgatgatggtgcgccagctggaattctcgctgttcgacttcgaactgcatgccacccacggtgatggccgcagcgtggcgcaggtgctggaaggcgtgcgcgatgaggtatcggtaatgcgtccgccggcctacaaccgcttccccaacagctttgcgcacatctttgccggcggttatgcggcgggttactacagctacaagtgggccgaagtgctctcggcggatgccttctccaagttcgaagaagacggcgtactcaacgccgaaaccggtcgtgctttccgcgaggcgatcctggcgcgtggtggctcccaggagccgatggtgctgttcgtcgacttccgcggacgtgcgccgtcgattgacgcactcttgcgccacagcggcctgagtgaggacgcggcagcatgagtgaagggcctgtgattaccaaaaagcagtttatcgccggggcggtctgcccggcgtgcagtgagccggacaaactgaagatgtggaccgaggacagcgtgccgcaccgtgagtgtgtggcctgcggttataccgacacgctgaatgatcaagggttgtcggtgcccaaggaattgggcacgcgggtcaataccacggcgttgaaagcgccggcggacccgaaggtgcaggcggtgcagtttttccccaatcccaagctgaaaaaggactgatacccgcttagggtgtcagcaccaattcagcgtctttcttgggttcgacacggctgctgccggccgtgttgagccagcttttcattgagcacagcgcgaattcactggtgctgcagtcgccatttgccaaggcggtgcgcaacttgtcgatatcagccttcatcatgtagcgaaccccgtccttgaagccgttgctggtgccaaacccgcccagggtcatttcgttcagcgcgtcttccttgctccacccctgaatcaccactcgatacatcgcggccatcaggccggtgcgatcagagccatgcttgcaatgcatcagcaccgggccgttggcttcggcgtcctggatggccctgagtgccgccagtacgtcggaatcgtcgacatggttagtgcgataagtcagctgtacccgtttgatatcagatgacttcaaccaggcggcatcagattccggcaaaaagttgatcactgtaccgatcttgagtttttccaactcaggcacggcgctgctatcgggcaaagcgctgcgatagagcgttggcgtcatttggtgcaggttgaattggttgcccactggctgggcccactcgggtgagcgaatggacgaagtctcatcggcctgggcgtgaacggcgccgagcagtgccatgaatgccaggccgagagcaggcagcaatcgagtgttggacatgcgctttgtgacccaatagggaaatggctgatggagcgcagattcgcccagggggggtcaacaccgtgtgaggtgctcgtcaaagaaacgtgaatggcctcatctgatccggtgtttttaccgctcaagcgattcgtcctgatgcttaggctgctatcatttgtaactattgtttgccggtgcctgatatcccactggcttgccacacatcacgctgctcccagaagtggcggataaacccgtgaccacatgatgaggtgccaccatgtctgatcaagatcaagacaacccccggcgtgactttttgcgcaaatccttgaccttgatcccgatggtcacggttgccagcaccggccttggcggctcgatgctgatggcaacgcctgaaccggcgcaggccgctcccgccaagcctgcgccgagtgaaaaggcctacgagcctacttacttcacggctgaggaatgggcgtttatcaacgccgccgtcgagcgcttgatccccgccgatgaccaaggcccgggtgccctggaagccggggcgccggaatacatcgaccgtcagatgaacaccccgtacgccagcggtgccctgtggtttatgcaaggcccgttcaacgcggatgctgctccagagatgggctggcagtccaaactggtacccaaggacatctatcgcctgggcattgccgcgacggatgcctggtcgaaagccttcaacggtaaaacttttgctgcgcaagacagcgctacccgagacgacatgttgcgtcgtctggaggctggcggaagtgaagtgacggcgcattttgacgcggtgccgccgaagatgttcttcaacctgttgctgcaaaacaccaaggaagggttcttttgcgaccccatccacggtggtaacaaaggcatggtcggctggaccatgatcggcttccccggcgctcgcgccgatttcatggactgggttgaacgcaacgagcaataccccttcccggcagtttccatccgtggcgagagggcttgaacgtggcgaccatcatgaagaaagtggatgcggtgatcgtcggcttcggctggaccggcgcgatcatggccaaggaactgaccgaagcaggcctcaacgtggttgcgctggagcgtggcccgatgcaggacacctacccggacggcaactatccccaggtcatcgacgaactgacctacagcgtgcgtaaaaaactcttccaggatatttccaaagagaccgtgaccattcgccatagcgtgaaggacgtcgccttgcccaaccgtcagttgggcgcgttcttgccgggcaacggcgtgggcggtgcgggcctgcattggtcgggcgtgcatttccgtgtcgacccgatcgagctgcgtatgcgcagccactatgaggagcgctacggcaaacacttcatccccaaggacatgaccatccaggacttcggcgtaagctatgaagagctggagccgtttttcgactacgcggaaaaagtcttcggcacctccggtcaggcctggaccgtgaatggtcggttggtaggcgaaggccgtggcggcaacccgtatgcaccggaccgttccaatccgtttccgttggaagcgcagaagaataccgtctccgcacaactgtttcagaaagcggctgccgaggtgggttacaaaccctacaacctgccgtccgccaatacctcggggccgtataccaatccttacggtgcgcagatggggccgtgcaacttctgcggtttctgtagcggctatgtctgctacatgtattccaaggcctcgccgaacgtgaacatcctgccggcgctgcgccaggtaccgaactttgagctgcggcccaattcccacgtgctcaaggtcaatctcgacagcaccaagagcaaggccactggcgtgacttacatcgacgcccaaggccgggaatgtgagcagccggcggacctggtgatccttggcgcgttccagttccaaaacgtgcgtttgatgctgttgtcgggtatcggcaagccctatgacccgataaccaatgagggcgtggtgggcaggaacttcgcctaccagaacatggccaccatcaaggccttcttcgacaaagatacccataccaacaacttcatcggtgcaggcggcaatggcgtggccatcgatgacttcaacgccgacaacttcgaccacggcccccatggcttcgtgggcggttcgccgatgtgggtcaaccaggctggcagccggccgattgccggcacgtctaaacctccgggcactccggcctggggtagcgcgtggaagcgcgccacggccgattactacacccaccaggtgtcgatggatgcccacggcgcccatcaatcctaccggggcaactatctggatctggacccggtgtaccgcgatgcctacggcctgccgctgctgcggatgacgttcgactggcaggaaaacgacatcaagatgaaccgcttcatggtcgagaaaatgagcaaggtcgccgaggcgatgaaccccaaggcgattgccctgctcggcaaaaaggtcggtgagcatttcaacacggcgtcctaccagaccacccacctcaacggcggcgcgatcatgggcaccgacccgaaaaccagcgcgttgaaccgctatttgcagtgctgggatgtgcacaacgtgtttgttcctggcgcgtccgctttcccacaaggcctgggctacaaccctaccggcctggtggcggcgctgacctactggtcggcgcgggccattcgcgagcagtacctgaaaaaccccggcccactggttcaggcataaggagcgatgaccatgaaagcacttgttatcgccaccttcgcccttttcagcagctgctctgtcagtgccgctgaaagcgatttgatcaagcagggtgaatacctggcccgcgccggtgactgcgtggcctgccacaccgccaaaggcggcaaacccttcgccggcggcctgccaatggaaacgccgattggcgtgatctattccaccaacatcaccccggacaagaccggcctgggcgactacagcttcgaggacttcgacaaggccgtgcgccatggcgtcgccaagagcggtagtacgctttacccggcaatgccctacccgtcttacgcgcgcgtcagcgacagcgacatgcaggcgttgtatgcgtatttcatgaagggggtcgagccggttgctcagcagaacaaggacagcgatattccgtggcccttgagcatgcgttggccgctagcggcgtggcgttggatgtttgcgccggctgtcgacgagcatcaggcgcaagccgccgctgatcctgtggtgagccgcggtgcctacctggtggagggccttggccactgcggcgcgtgccatacgccacgggccttgaccatgcaggaaaaagccctgagtgccactgacggcaacgctttcctgtccggcagtgcgccgctggagggctggatcgccaaaagcctgcgcggtgaccacaaggatggtctcggcagttggagtgaggaacagttggtgcaattcctcaagaccggccgcagtgatcgcagcgcggtgtttggtggcatgagcgacgttgtcgtccacagcatgcagtacatgtcggaaactgacctgacggctatcgcccgttacctcaagagcttgccggcggtggaccccaaggaccagccgcatcagtacgacaagcaagtggccgaggcactgtggaaaggcgatgacagcaagccgggcgcgtcggtctatatcgacaactgcgcggcctgccaccgcaccgacgggcatggctatacgcgggtgttcccggcgctggcgggtaacccggttttgcagacggcggatgccacgtcgttgatcaacatcgtgttgaacggcggcaccttgccggctacccacgcggcgccatcgaccttcaccatgccggcgttcgcctggcgcctgtcggatcaggaagtggcggatgtggtcagtttcattcggggcagttggggcaataaaggtgcgccagtgaaagccaacgatgtggcggacttgcgcaagaacgatatgcgcaccacctcgggcgatgacctgggccaggttactcaacagcactgatccctggcttaccgccaaacggcactggtcagaagccttgcgcctcgatactgtatataaaaacagtatcgaggcgctttcatgtctactccgctgccgccccgaggccggggcacggccaccaacctgcacaaccgcttcgcaccgactgtcagcgtggtggaggatgacggctggttccaggaagtgccgccgacccatggcactgaagtgcgcatcgaaacggccaagaccatcatcacccgcaacaattcgccggacttgccgttcgatcgttcgatcaacccctaccgtggctgtgagcacggttgtatctactgctacgcgcggccgagccatgcctattgggacatgtcgccggggctggatttcgaaaccagactgatcgccaagaccaacgctgccgatgtgctggaacagcagctgtcgaaaccgggttatgtgtgcgcgccgatcaacctgggctccaacaccgacccgtaccaaccgatcgagcgcgaatacaagatcacccggcaaaccctgcaagtgctgctgcgctatcgccacccggtgaccatcataaccaaggggtcgctgattttgcgcgatctggacctgctcaccgagttggcgcgccagcgactggtggccgtgatgatcagcctcaccagcctggacgacgaactcaagcgcatcctggagccacgcacggcggcgcccaaggcgcgtctgcgcgcgatccgggtgatgcgtgaggcggggatcccggtgggcgtgctgtgctcgccgatgatcccgatgatcaacgacagtgagttggaaagcctgctgaccgaagctcacgcagcgggcgcgcaaagtgcggcgtacatgatgctgcgcctgccgctggaggtggcgccgttgttcgaggagtggctggcggcgcattacccgcagcgtgcggcccatgtgatgagcctggtgcgccaggtgcgtggcggcgaggtgtatgacagccgcttcggcgtgcgcatgcgtggcgaagggccgtttgccgatttgctggcgcagcgcttcagcaaggccatcaagcggctggggctcaaccgccgggaagggtttaacctggattgcacggcgttctgtcctccgggcagacagatggcattgttgtagactgacaaggaggaatgcatcgttcctgtaggaatagtcgcgttttgacatcactgaaacccgcgatctagagcggttcattcagtttgagttaagtttcgacggttaccttgttcagcgagtgactgatgagtcggcactctggcccctggcgttttacaactaatccactggccaagcgtccaactgacctgaacactcccctgcattaatcaagaggatgaatcatgagtgacaaggataaacagccgttggctgcgtcggcttctgcccctcaggtggctgaaaccgccgatgcagcgctaaagcacattgttgacggctttttgcatttccatcacgacgtcttcccccagcaggaagaactcttcaagaaactcgccacggcccagagcccacgggcgatgttcattacctgcgccgactcgcgcatcgtgcccgagctgatcacccaaagttctccgggcgatctgttcgtgacccgtaacgtcggcaacgtcgtaccgccttacggccagatgaacggcggtgtttccacggctatcgagtacgcggtactcgccctgggcgtgcagcacatcatcgtctgcgggcactccgattgcggcgccatgcgcgcggtgctcaaccccgacagcctggaaaagatgccgacggtcaaggcctggctgcggcacgccgaggtcgccaagaccatggtccatgacaactgcgactgcgccaatgaaggcgagagcatgaaggtgctcaccgaagaaaacgtcatcgcccaactgcaacatttgcgtacccacccctccgtggcttcgcgcatggccaatggtcatttgtttatccacggttggatctacaacatcgagaccagcgaaatcagcgcctacgatgccgatcagtcgacgttccgaccgttgagcggcgacggaccgatcccttgcgcgacgcctaaagcgcgcttctaaaacacttccctgccgggtaaagcggtggctgccatggacgcagccaggctttaccgcgcccggcgaatgcctcgggagagccatcatgcgtgctgctcaattgaaagctgtattgccaagggagctgctcgcttccgtggttgtgtttctggtcgccctgcccttgtgcatggggattgcgatcgcctccggcatgccgccggccaaaggcctgattaccgggattatcggtggcctggtggtgggctggctggcgggctcgccgttgcaggtcagcggccccgcggcagggctggcggtgctggtgttcgagttggtgcgccagcatggcatgctgatgctcggaccgatcctgctgctggcgggattcctgcagctggttgccgggcgtttgcgcctgggctgctggtttcgcgtcacggcaccggcggtggtgtacggcatgctggcggggattggcgtgctgattgtgctgtcgcagattcatgtgatgctcgacggcgcgcccaagccttccgggttggataacctggcaggcttcccggcggcactggccgacgcaatcccgaccctgggcggtggcctcggctggcaggcagggttactcggtttgtcgacgatgctggtgatgtacgcctgggacaaattgcgcccgcagaagctgcgctttgtgcctggcgctttgctgggcgtgggcctgaccacggtggtcagcctggtgctggcgttgcaggtcaagcgtgtcgaagtcccggaaaacctcgccgatgctatcgactggctacgccccagcgacctgttgaacctcgccgatccccagctgttgatcgcggcatttgccgtggcgtttatcgcgagcgctgaaacgctgctgtctgccgcggcggtcgaccgcatgcacagcggtcagcgttcggatttcgacaaggaattgtctgctcaaggtgtcggcaacatgctctgcggcctggtcggcgccctgccgatgaccggcgtgattgtacgcagctcggccaacgtgcaggccggcgctaccacgcgcttgtcggcgatgttccatggcctgtggctgctggcgttcgtgctgttgctgtcgagcgtgctgcaaagcatcccggtggcgagcctggcgggagtgctggtgtacaccggtatcaagctggtggacatcaaggcgttcaaggcactgggacgttatgggcggatgccgatgtttacctacgcggccacagcgctggcaatcatctttaccgacctgctgaccggcgtattggtgggcttcgggttgacgttggtcaagctggcgttcaaggcttcacggctcaaggtcagcctgatcgacttgcctcaggacggtgagatggagctgcgcctgacgggtgcggcgacctttctgaaagtgcctgcgttgactcaagtgttgtcgacggtgcctgccgggacgaccgtgcatgttccgctgagcaacctgagttacatcgaccattcctgcctggagttgctggaggaatgggggcgggccaatgcggccaagggctcgaagctggtgattgaggcgcgcgggttgaaacgtaggctggaaggtcgggtgaggacgacgacagggattggctcagcgccagcctgaacagcaaacaacacccctttaggagctggcaagccagctcctaaaggcgggatcaggccggctgatccagcgccaactcaacccccagctgtcgcgacaggcatggccagcgcttccacgcggcttcggtgtccgggctcttgagctgctcgcgataagcctccacggactccagcgcaaagctgtcttcgttgagcatttcatccactgcgtggtgcaccgcttcatccagctggttggcgaaggcttcgccgatcagctgatgggcaatgacattggccactgtggtatcggccggaatcaacggctggccaaagtgcttgatatacagatcgttgacctcttcgaccaggcgatgagccaggtaggcctcatccagcaggccatcgagaccttcatggccggccaggatggcgggcggttgcaggaagaaatgctcggcgatcttcagtaccggcttgatctggctttcgataccggcctcgcgggccacgtcgttggcggcgtccagcaagtccgggactaggtcgatgtaggcggtgacaaagcgtgtcatgacaatgttgcgatcaccgtcagccagagatatggccgaatgcaggtgcggcaattgtttttccagttgcagggcaagctggccagtgctggcttcgtgttgatgggcacgggaaatctgctcgcgcaatgcggcggtgttcatgaaagctccagtgatgcaggcgtaggaaaagggagaagataaggtagctcgtttatacgagcgcctcagacgcatttgtcataattatttcatggttatgcgcctgcgttatatcgaattgccatcgttcgtcggataaacgattccgtgcccggttttattgactccagccagtcatttctactcatttgcccctacacattgcggggttgcagagcctgtctatactcggatttgtacgcgattagctgatgacgccagactgcataagcaggcaaggccaggcggttgtaagcagtatggaagccgctcccttcgacgcaggtgcaaaccggcgggataacaagaacgataaggggaacccgcaatgatgcgacatccacatgtttggatgggcctcctgttgtggtcggtattcggccaggcacatgccgcctggacaacgaatatggcgccaggggcgacagaagtcagtcacgctgtgttcgacctgcacatgaccattttctggatctgtgtggtgattggcatcatcgtgtttggcgcaatgttctggtcgatgatcgttcatcgccggtccacgggccaggtggcggccaagttccacgagagcaccaccgtggaaatcctctggaccgtcgtacccttgctgatcctgatcgcgatggccattccggcgaccaagaccctgatcaatatctacgacagcagtgagtcggatatcgacatccaggtcaccggctaccagtggaagtggcattacaaatacctgggccaggatgtggagttcttcagcaacctggccacgcccgccgaacagatccacaaccaggcgaccaagggcgaacattacctgctggaagtcgaccagccgctggtgctgccagtgggcgccaaggtgcgcttcctggtgacggccgccgacgtgatccactcctggtgggtgccggcgtttgcggtcaagcgcgacgccatccctggcttcgtcaacgaggcctggacccgtgtcgagaagcctggcatctaccgtggccagtgcgccgaactgtgcggcaaggaccacggcttcatgcctatcgtggtcgaggtcaagtccaaggccgactacgacacctggctcggcgagcgcaaggcagaggccgccaagctcaaggaactgacctccaaagagtggaccctggaagagttggtggcccgtggcgacaaggtctaccacaccacctgcgtggcctgtcaccaggccgaaggccagggcctgccgccgatgttcccggcgctcaagggttcgaagatcgccaccggtcctgccgccgatcacctgagcctcgtgtaccacggcaagcccggcaccgcgatggcggcattcggcaagcagctctcggaagtggacatcgccgccgtggtgacctatgagcgcaacgcctggggcaacaacaaaggcgacatggtcacgcctaaagacgtgctggccatcaagcaggcggaaagcaaatgacctctcccatggcattgacctcgacccgccccgcccactcgcttgcaggagaacggccatgagcgctgtgatcgacgaccatggtcacgccgaccatgcccacggccccgccaaggggctgatgcgctgggtgctgaccaccaaccacaaagacatcggcaccatgtacctgtggttcgcctttgccatgttcttgctcggcggctcgttcgccatggtgatccgtgccgagttgttccagcccggcctgcagatcgtgcagccggcgttcttcaaccagatgaccaccatgcacgggctgatcatggtgttcggcgcagtgatgccggcgtttgtcggcctggccaactggatgatcccgttgatgatcggcgcgcctgacatggccctgccgcgcatgaacaacttcagtttctggctgttgccggcggccttcctgctgctggtctcgacgctgttcacgccaggcggcggtcctaacttcggttggaccttctatgcgccgctctccaccacctacgcgccggaaagcgtgacgttctttatcttcgccatccacctgatgggcatcagctcgatcatgggcgcgatcaacgtggttgccaccatcctcaacctgcgtgcgccaggcatgaccttgatgaaaatgccgctgttcgtgtggacctggctgatcaccgcgttcctgctgatcgcggtcatgccggtgctggccggttgcgtgaccatgatgctgatggacatccacttcggcaccagcttcttcagcgcggccggcggtggtgacccggtgctgttccagcacgtgttctggttcttcggccaccccgaggtgtacatcatgatcctgccggccttcggcgccgtcagttcgatcatcccgaccttttcgcgcaagccattgttcggctacacctcgatggtctacgccacggcgagcattgcgttcctgtcgttcatcgtgtgggcgcaccacatgttcgtggtgggcatcccgttggtgggcgagctgttcttcatgtacgccaccctgctgattgccgtgcccaccggggtgaaggtgttcaactgggtcagcaccatgtggcaaggctcgctgaccttcgagacgccgatgctgtttgccgtggccttcgtgatcctgttcaccatcggcggtttctccgggctgatgctggcgattgccccggcggacttccagtaccacgacacctatttcgtggtggcgcacttccattacgtactggtgcccggtgcgatcttcggcatcttcgcctcggcctactactggctgccgaaatggaccggccacatgtacgacgaaaccctgggcaagctgcacttctggctgtctttcgtgggcatgaacatggcgtttttcccgatgcacttcgtcgggctggcgggcatgccgcggcgggtgccggactacaacctgcagttcgctgacttcaacatggtctcgtcgatcggcgctttcatgttcggcgccacgcagatcttcttcctgtttatcgtgatcaagtgcatccgtggcggcccgccggcgccggccaagccctgggatggcgctgaaggcctggagtggagtatcccttcgccggcgccgtaccacaccttcaccacgccgccggaggtcaaatgaacacgccttggcactgcgtacacggccaatgtgggagggggcttgcccccgatggcggtgtgtcagccgacatcatgattggctgtaaaacagctatcgggggcaagccccctcccacaatggcctcattcacattgggtgggcgtcatggctgaatccttgccgatcaagcgcctggtcacgcgcctgctgatcctggtggtggcgatgttcgccttcggctttgcgctggtgccgatctacgacgtgatgtgcaaggcgttcggcatcaacggcaagaccgccgggcagtatgagggcgagcaggttgtcgacccgacgcgccaggtgcgcgtgcagttcctgtccaccaacgccatcgacatggtctgggatttctatgccaaggcggacgaagtggtggtcaacccgggtgcggtaaccgagatgctcttcgtggcccacaaccccaccgacaagccgatgactgcccaggccgtaccgagcatttccccggccgaagcggcgatgtatttccacaagaccgaatgcttttgcttcacccagcaagtgctgcagccgggccagcgcatcgagatgccggtgcgcttcatcgtcgaccgcgacatgcccaaggatgtgaagcatctgaccctggcgtacacgctgttcgatatcactgcgcgccaaccgcccgtggctgtgcacagcggcggctagctactgtttgccccctcaatcaggagagcgaatacatgtcgactcatgatacgtactacgtaccggcgcaaagcaaatggccgataattgccacgattggcctgctggtcaccgtgtatggactggctgtgtggttcaacgacttgaaggcggcacgcccggaatcccacggcccgtggatctttttcgtcggcgggctgctgctggcctacatgctgttcggctggtttggtgcggtgatcaaggaaagccgcgccggtttgtacagttcgcagatggaccgctcgttccgctggggcatgacctggttcatcttttccgaagtgatgttctttatcgccttcttcggtgcgctgttttatgtgcggcacatgtccggcccgtggttgggcggtgagggtcacaagggcattgcgcatatgctgtggccgaacttcgaattcacctggccgctgctcaacaaccctgaccccaaaatgtatcccgcgcctgaaggcaccatcagcccttggggtctgccgctggtcaataccatcctgctggtgagttccagcgtgaccatcactatcgctcaccatgccctgcgcaaaggccatcgcggcgcgctgaaaatctggttggcgatcaccgtcctgctgggtatggcgttcctgggcttccaggccgaggaatacatccacgcgtacaaagagttggggctgacgctcggctccggcgtctatggcgcgaccttctttatgctcaccggcttccacggcgcccacgtgactattggcaccctcattctgttcgtgatgctgatgcgcatcctcaaggggcatttcaatgccgagcaccagttcggcttcgaggcggccagttggtattggcactttgtggacgtggtgtggatcgggctgtttttcttcgtctacgtgttgtgagacggcttaccacggcgcatgagaaaccagttggccgctgaaaaagccccaggtgatcaaggccagggtgatcacggccagcaccacacgcacggtcagggcgttgacgaggcggttggagttgccctcgtccttgaccagaaagaacaagccactgaacaggctcacgacggtcgcgatcagcatcagggcaatagcggctttgagcatggtcgggctccacggggatgggcgggcaatgaaaacaagtatagccagcgccgcaaaacgctttcgtccagggatcgcacccaccttagtggtgctggtgctgctgcccctgatggtggggttggggttctggcaactgtcgcgcggccatgaaaagcagcggctggtggatagttatgccgagcggcgcgcagcggagccggtcagcagtgcgcaactcaatgatatggccgacccggcctttcgccgcgtgcgcctgcgtgggcagttggatgccgagcacagcgtgtttctcgataaccgcatgcgcgacggcaaggccggcgtagagctgctgcaacccttccacgatcaggccagcggcctgtggctgttgctgaatcgcggctggctgccctggccggaccggcgcacaccaccagccttcagcaccccggagcagcccttgaatctggatgcctgggtctacgtcgcccctggcgaaaccttccaactgcacgccgaccccgccagtgcgcaatggccacgcctgctgacggcgctgcaccccgccacgttgtgggcggagttggggcgcagcggtttcgcctacgaactgcgcgccgaacccggccccggcacttacgaaaccacctggcccgtcgtggccatgggcccggaaaaacacctggcgtatgccgtgcagtggttcgccatgtcgctagcgttgctggcgctttacctctacctcggatggcacaacaaaaaggagaagccccatgggagcggccatgaatccacccaacatgtctgaggtgcctgatcggcgcaaaggccgttggcagttgatcctgatcctgatgatggtgatcggcccgatggcgctggccaccttcatgtacaagctgcagttctgggtgccggacagtcgcagctaccacggcgagatgatcggcaacggccagacccgcgccgacattggcgtgccggccgatgagcagcgctggcaactgctggtcaccgcgcccgccgcgtgtgccgccgattgccagcaactggtctacctcgcacgccaattgcagattggcctggggcgcgacgcttcccgtgccagccatgccttggccagtgcgcagccgctgggcagcgactatgacgccaagctcaaggccgagtacccgcaactgcaacgctacccgctggacttgtcgaccttcagtaaaaatgccgctgcgccgggcgatgcgcagctgtggatcgtcgacccccacggcaacctggtgctgcgctacgacgccagggtcaacggcaaggacttgctcaacgacctgcgccatctgctgaaactgtcgaacatcggataggggcatcgtcatggccaaacctggatttcgcctcgcgttgtttgcgaccttgctggcgctgattgtcgtgctgctgggggcgtatacccgcctgacccacgccggcctggggtgcccggattggcccggctgctacggctttatcagcgtgcccaacaccgaggctcaactggcccatgccgagctgcatttccccgatacaccggtagaggccgacaagggctgggccgagatgacgcatcgctacttcgccggcaccttgggcttgttgattgtgttgctggcggcgcgctcgtggagccatcggcgcaatccgggccagccggtgaaactgccgctgttcgtgctggcggtggtattcgcccaggccgcatttggcatgtggacggtgacgttgaagctgtggccgcaggtggtgacggggcatctgttgggtggctttgcgacgttgagcctgctgttcctgctgaccttgcgcttgtctggcgtattgccggccttgatcgtgcccaagcgcctgcaatattgggcgacggcaggcctggtgctggtgatcagccagatagccctgggcggctgggtcagttcgaactatgcggcggtggcctgtatcgatttgccgacctgtcatggcgagtggtggccggcagccgattttgccaatggcttccatctcacccaacacatcggccccaattacctcggtgggcagttggacagcgaagcgcgcaccgccatccacctgacccaccgcatcggcgccgtcgttgtcagcctggtgctggtgggccttgcctggcaattgcgcgcggtcggcatgacgcggttggccggcttgctgctgatcgccctggcggcgcaaatctgcctgggcctgagcaatgtgtatttccatctgccgctgccggttgcagtggggcataacgcgggcggtgcggcgttgttgctggcgctggtactggtcaactaccacgcccgcaccagcctggtccgggtgcgcaaccagctgccgtttggctggcgctttatcccgcgcaagcatgtgtcgggcctcgttacccttaaaggagagatgccatggcgaccttgatcggcgcgcgtcacggccaggccatctggcgtgattatctggagctgaccaagccgaaggtggtggtgctgatgctcatcacctcgctggtggggatgttcctggcgacccgcgccggtgtgccgtggaccgtactggtgtttggcaacctggggattgccctgtgtgccggtggcgcggcggcggtgaatcatgtggtggatcggcggatcgatgcggtgatggcgcgcacccacaagcggccgttggcgcaaggccgtgtgtcgccgctggcggcgctggcctttgctttgtttctggctgttgcagggttggctctgctgctggcgtttaccaaccctctggcggcttggctgacgctggcctcgctgctcggctatgcagtgatctacaccggctttctcaagcgtgcgaccccgcagaatattgtcatcggcggcttggccggggctgcgccgcctctgttgggctgggtcgccgtgaccgggcatatcagcgccgagcccctgctgttggtgctgatcatcttcgcctggaccccgccacacttctgggccttggccatccatcgcaaggaagaatacgccaaggccgatatcccgatgctgccggtgacccacggcgagcactacaccaaggtgcacatcctgctctacaccttcgccctgctggcggtgagcctgatgccctacgtgatccacatgagcggcctgctgtacctcggctgcgccctggtattgggcgggcgctttctgcaatgggcctgggtgttgtaccgtggcggtcggccgcacgcggcgatcaacaccttcaagtactctatctggtacttgctgctgctgtttatcgccctgctcgtagaccactacctactgttgaacctatgactcgaactcaaaagactgtcttcatcctagtggccctggtggcattgatcatgggcctgaccgttaacaaagtgctctcgggcaagggccagggcgaccccactgccttgatcgacgccggcatcatcctgctgccgcaaagtcgtcaactgccgccggtgaccatgaccaaccaggacggccagccagtgctggtcaatgaattgaaaggcaagtggagcctgttgttcttcggctacaccttctgcccggacatctgcccgactaccctcgcccagctgcgccagatcaagagcgagctgcctaaagaggctgtggataagttgcaggtgattttggtcagtgtggacccgaaccgcgatacgtcgacccagctcaagcagtacctgggctacttcgacccgcagttccagggcctgacgggcgcgaatgtggaggaggtgcagaaggtctcgaatgcggtgagcatcccgtttattccggcggacaccagtaagccgaactacaccgtcgaccacagcggcaacctggcgctgatcgggccggatggaacgcagcgtgggtttattcgtgcgccgctgaacaaccagaagctggtggcgcagttgccagcgttgctgcagcgtcaataacaggcgacacataacaaatgtgggagggggcttgcccccgatagcagtgggtcagccaccaaagcagtgactgacactcagcaatcgggggcaagccccctcccacattttttgatctccagtacttgggagatcgggttacatcagaacgccggcttgatcgcgcctttgtacttctcttcgatgaattgcttcacttcaggcgtgtgcagggctgcaaccagcttcttcacggcgtccgagtccttgttgtcttcgcgggtcaccaggatgttcacgtaaggcgagtcgctgccctcgatcaccagcgcatccttggacgggtccagcttggcttccagcgcgtagttggtgttgatcagcgccaagtcgacctgggtcagtacgcgcggcagggtagcggcttccagctcgcggaatttcaggcctttagggttggcggtgatgtccttgatggtcgacaggatattggtcgggtccttcaaggtgatcaggccgttcttggccagcagcaacagtgcgcgaccaccgttggtggcgtcgttggggatcaccacgttggcaccgctaggcagctcgtccagcttcttgtacttgctggagtacgcgcccagaggctccaggtgcaccgcgccaacgctcaccaggtgagtgcccttggctttattgaattcatccaggtacggctggtgttggaagaagttggcgtccaggcgcttttccgcgacctgtacgttcggctgcacgtagtcggtgaagactttgacctgcaggtccacgccttctttggcgagggcaggcttcacgaattcgaggatttccgagtgtgggaccggcgaagcggcgaccgtgatggtctcggcgtgggcggaaaacgcggcaacggcggcgaaagcaaccagtagttttttcatccaacaagctccttgttcgggcatgtgccggcatgtcaccggcaatggccgttattttcgagaaaagtgcaccaccagcttgtcgccgacggtttgcagaatttgcaccaggatcaacagcatcaccactgtgaccaccatcacgtcagtctggaaacgctggtaaccgaaacggatcgccaggtcgcccaggccaccggcacccaccacaccggccatggccgtgtaggacaccagtgtaatcgccgtcaccgtgatcgccgcgaaaatgcccgggcgggcttcgggcagcaaggcgttggtgatgatctggcgcgtgctggcgcccatggactgggtggcttcgatgatgccgcggtccacttcgcgcagcgcggtttccaccaggcgtgcaaagaacggggtcgcgcccaccaccagtggcggaatcgcaccggccacgcccagcgaagtgccggtgatcagcacggtgaacgggatcatcacgatcagcaggatgatgaacggcagcgagcgcaggatattcacgatcagcgacagcagcgcgtacaggcctttctgttcgaacagttggcgcgggctggtcaggaacagcagcacgcccaggggcaggcccagcaccacggtgaagaacagcgagccgaacagcatggtcatggtgtcgccggtggccagccagatttcggaccagtcgatattggcgaagaaactcaacaggacgtccattagcgcaggatctccatgtggacatcagcggcggtgaagcgcgcaaacgcggcttccatgtcgccaccggtgacggcgagggtcaattgcccgtaagggatgtctttgatgcggtcgatacgaccggcgaggatgctgtagtccacgcctgtttcgcgggcgacggtgcccagcagcggcgcgtaggtcgcttcgccctggaacgtcaggcgcacgatacggcctggcacgtgggcgaagtcgtcgcgctgctcgttttcgtcgacctgctcggactcttgcacgaagcgcttggtcgtcgcgtgcttggggtgcaggaacacatcggccaccgagccttgctcgacgatcacgccagcgtccatcaccgccacctggtcgcagacgcggcggatcacgtccatttcatgggtgatcagcacgatggtgagcttcaactcgcggttgatctcggccagcagttgcaataccgaggcggtggtctgcgggtcaagggcgctggtggcttcgtcgcacagcaggatctttggtttggtcgccagggcgcgggcgatgccgacgcgttgtttctggccaccggacaactgcgccggatactttttggcgtggtccgacaggccgacgcgggcgagcagttctgcgacgcgcaggtcgatgtccttgcgcgacagttcgccggccagggtcagcggcagtgccacgttgtcggccacggtcttggaggccagcaggttgaagtgctggaagatcatcccgacctgctgacggaagcggcgcagaccgttggcgtccagggcggtgacttcttcgccgtctaccgtgatcttgccaccgctcggttcctcgaggcggttgatcaggcgcagcagggtgcttttacccgcaccggagtggccgatcaggccgaacacctggccgtttgcaacactcaggttggtggcgtgcagtgcgggaatatccctaccggcgacgcggtaggttttatggacgttttgaaactcgatcacgtagcgaaccttgtggggcgcatggaaaagggatcagcggttagccgggcgcgcattttagcctgtccgtatagcgtttcttagcatttatttcgcattcaaccagcgatttggcaataacgcgatcaaaggtcataaaaaaggaacggcccaaaaccccatcagtcactacttaagcaatgcgattcccgggtgccgtgcctgggtctgaataaggagttttgactgatgagtacgaaaaagccaaagagcgaactcgcagggaccgacaccctggaccgtaagaacaccaatgccaagctagagtctttggaagaattccgctccgacgctaccggccaggccctgcgtaccaaccagggtgtgaagatctccgacaaccagaacagcttgaaggtcggcgcacgcgggccgtcgctgctcgaagatttcatcatgcgtgaaaaaatcacgcactttgaccatgagcgtatcccggagcgcatcgtgcatgcccgtggtactggcgcccatggctattttcagacttacgagaaccattcggcgctgaccaaggccgggttcctgcgtaaccctgggcataaaacgccggtcttcacgcgtttttccaccgtgcaaggcccgcgtggttcgggtgacaccgtacgtgacgtgcgcggttttgccgtgaagttcttcaccgaagaaggcaacttcgatctggtgggcaacaacatgccggtgtttttcattcaggacgcgatcaagtttcctgacttcgtgcacgccgtgaagcccgagccgcacaatgaaatccctacaggcggctcggcgcacgatacgttctgggacttcgtctcgttgcagcctgaatcggcgcacatggtgatctgggcgatgtctgaccgcgccattccaaaaagcctgcgcagcatgcagggttttggcgtgcacaccttccgcctagtgaatgccgagggaaaatctaatttcgtcaaattccactggcgccctacagccggtacctgctcgctggtgtgggacgaagcgcagaagctcgccggtaaagataccgactaccatcgccgcgacctctgggaagccattgagatgggcgactaccccgagtgggaattgggtgtgcaggtgattcccgaggacaaggagcatgcgttcgacttcgacatcctcgacccgactaagctgatccctgaggaactggtgccgattacgccgctgggcaagatggtgctcaaccgcaacccggacaacttcttcgctgaagtcgagcaggtggcgttctgcccaggccatatcgtgccgggtatcgacttctccaatgacccactgctgcaaggtcggttgttttcctacaccgatacgcaaatcagccgactcggcgggccgaattttcaccagttgccgatcaaccagcctgtgacgccgctgcataacaaccagcgcgatgccatgcaccgcagcaccatcgataaagggcgcgccgcttatgagccgaactccatcgatggcggctggccgaaagaaaccccaccggctgcgcaggatggcggttttgagtcctaccctgagcgtatcgacgcgcacaagatccgtgagcgcagcgagtcgttcggcgatcacttctcccaggcgcgtctgttcttccacagcatgagcaagcacgagcaggagcacatcattgctgcctacagctttgagctgggcaaggtcgagcgcgagtttatccgtgcgcgtcaggtcaacgagatcctggctaatatcgaccttgaactggccaaacgcgtggcgcagaacctggggctgcccgcgccgaccaaaggcacggtgccggtacgtaaaacccagccggagcgttcgcctgcgctgagccaggcgaatttgctgccgggcgatatcaagacccgcaaggtggcgatcctggcagccaacggggtggacggggcggcgattgctgcattgaagaaggcgctgcaggccgaaggtgcgcatgccaagctgctggggccgacctcggcgccggtgaagacggccgatggcaagagcctgccggtggatgcatcgatggaaggcctgccgtcggttgcgtttgatgcagtgttcatccctggcgggaaagattcggtgaaggcgctgagtggcgatggggtggcgctgcattacgtgctggaggcgtacaagcacctgaaggcgattgccgtggccagtgatgccaagcctctgttggatctgctgaagcttgaggcggatgcggggttgatcgtgggcgcggacgctaaggcgttcaaggcgttctttgccgcgattgggcagcatcgggtgtgggatcgtgaggcgaaggccaaggcgattccggcttaagtctttggttgtttgttagattgtcatcgggggcaagccccctcccacattttgagctgtgaatacattaaaagtgtgggagggggctttcccccgatggttttattccgccttgcgcggaatcagcacaacctgcgccggaatcttcttcagaatctgccggtgaatcttcaggtcataccccgaatcaattcgcttcacccgtttggtcagcaacgtggccagccatgggtaatcctctgtgcgcggcgcctggatgcttacatcgcactggtaattcaccacgtcggtggcaatggcatccagctgatggcgcagttcttcgatgttggtgaggttcagtgccacggtggtgctgggtgccgtcgggtcgatgaccttggcggcgggcttggcttcggcggctttcaggtcggcttcggctttgtccagctcggccttgcgcgcatggctgatggcgctgttgaccccaccggtcagcgcgggtgccttgggcatcagggcgcgggcacggctaagggcggtcgcggcggcgtttacatcacccttttgcagcacgatctggctgcgttgcaagtaggcttcggccaattgccgctggtaggtttccagcgttgggtcgttgggcgattgggcttgcagcgccgccaattggtcctcggcagtggcaagctcgctgctgaccaggttttgctccagctgtgcgatggccgcagcgcgtgcgtccggggcctctgggacggcgggcggtgtgctttgacaggcgcccagcagcagggaaaatgcggcaaggagcagataacgggaggtgaacggcttcattcctgcgactctctatttgcgcaaaaagcgagcaagtctacacccctcgacggggcaggacaaaactcagcagaaacagggcggcggccgtgaccacaatcgacggcccggccggcgtgtccttgaaccaggacaacgccaggcccccgcacacagcgagcatccccagcaggctggcgcccaccgccatctgctccggtgagcgggcgtggcgctgggcagcggccgcgggaatgatcagcagcgacgtgatcaacaatacgccgacaatcttcatcgcgacagcgatcaccacggcgatcaacaacatcagggccatgcgcagggccggcacgggcaagccttctaccgtagccagttcttcatgcacggtaatcgccagcagcgggcgccacagggcgaccagcagcaccagtacagccgcgctgccgccgaggatccaggcaaggtcgccggggctgatcgccagcaggtcgccgaacaggtaggccatcaagtcgatgcgcacttcatgcatgaagctcagcaccaccaggcccagggacagggtgcttggcgccaggatgccgagcaaggtgtcggaggccaggggctggcgctgttgcagggtcaccagcagtaccgccaacaacaggcagccgactgtcacggcgatggtcgggctgacatccaacagaaagcccagggccacgcccagcaacgcggcgtgcgacaaggtgtcgccaaaataggccatgcgccgccagaccacaaacgagcccaatgggcccgccaccaacgccaaagccaagcctgccagcagggcgtagagcagaaaatcagccatgcttgcagctatctccatgaacgtgggtgtgaggggcggcggggtcatcgacgacggcgccgtgcagatcgtgggcgtggtcatgatgatggtggtagatcgccaggctctgggcgttcttgccgaacagctcgacgaacgccgggtcgccgctgacctgttccggatggcccgagcagcacacgtggcggttgaggcacaccacctgatcggtggtgctcatcaccaggtgcaaatcgtgggacaccatcagcacaccgcaaccatgacggtcgcgcaggcgggtgatgaggctgtacagctcggcctggccggcgacgtcgacgccctgcacgggctcatccagcaccagcaactccggctcgcgcagcagggcgcgcgccagcagcacgcgctgcatttcgccgccggaaatgctttgcactgggctgtcgatcacctgttcggcaccgacttccttgagcgcagcctgggcgcgtgcacggtccacgccaggcaccaggcgcaggaaacgcaggacggacaatggcagggtcggatccacatgcagtttctgcggcatgtagccaacacgcagcctgggcttgcgccacacactgccggtgtcgggcttgagcaggcccagcacggcgcgcaccagggtggtcttgccggcgccgttggggccgatcagggtaacgatctgccccggttccacgctcagtgcgatgttatccagcacgttttgcccggcgaacgtgaccccgacctgttccaggcggattaacgcgttgctcatcaagccccctggcagcccgagcacaggccgaccacttcgaccgtttgcccttcgacccggaagccgacctcggcagaacttttgatgatggcgtcgctgatgcttttttgttcaagctcgatggcggcgtggcactcgcggcagatcaggaactggccctggtgtgcgtgttccgggtggctgcagccgacgaaggcgttcagcgaggcgattcggtgcaccaggccgttttccagcaggaaatccagcgcgcggtacacggtaggcggcgcggcgcggcggccgtcctgctcgctgagcacgccgagaatgtcgtaggcgcccagcggcttgtggctctgccacaccaattccagcacgcggcgacgcagtgcggtcaggcgcagacccttctgtgtgcacagggtgtcggcctccgacagcgcggtatgcacgcagtgagagtggtcgtggggacggctggcaagcggtgttttaggcatgagcggcgacagatatttgatagagacgttattatgttacccgttcctacgccattgagtggtcatcgtgtcccgactttttcccgtttttgtcgtatttgtcaccagtttgttcattactggcgccgctcaggccgaggtcaaggtgttgaccagcatcaagccgttgcagttgatcgcagcggctgtacaggacggtgtggcggttccggaggtgctgttgccacccggcgcgtcgccgcataactatgcgttgcgtccatccgacgtacggcgtgtgcagtcggttgacctgctgtactggatcggcccggatatggagagtttcctgccccgtgtgctgaaaggtcgtgcggctgcaactgtggcggtgcaggatctgccggacatgaagttgcgtcgttttgccgaagatagccactcacacgccgatgaagccgacgagcatgatcacgatcaccgcccaggcagcctcgatgcgcacttgtggctgtctaccgtcaacgcacgtgtgattgctgcgcgcatggcgactgacctggccgccgccgaccccgccaacgccgcgcgttaccagagcaacgtgaaggccttcgacgagcgcctggatgccctggatgctcgcctgaaagcccgccttgcgccgatcgatggcaagccttacttcgtgttccacgaagccttcgattacttcgaagacgcttatgggctcaagcatgccggtgtgttcagcgtggcagctgaggtccagccgggcgcccagcatgtggcggcgatgcgcacccgtttgcaggaagtgggcaagacgtgtgtgttcagtgaaccgccattgcgtccgcgcctggctgaaacgctggtggccgggttgccggtgaagttggcggagttggatgcgctggggggttacacgccggccacggctcagggttatgagcaggtgctggataagttgggcaacgatctggcgggttgcctggagtcactctgacagcaaacgacgaccaaatgtgggagggggcttgcccccgatggcggtgtgtcagtcactaatatttcgactgattcactgcaatcgggggcaagccccctcccacattttttgatctcacaggtctttagagggcaaatggcagttgcacggtgacctgctgacgctgcaccagccgatgctcgaactccgccgggtcatggatcaacacatcctgcccggcaaacgactcagcggcgatcaggcgtgacagccagaaccgcacacaggccacgcgcaacatcgtcggccacagttctgcctctttcgcggtaaacggccgcagccccgcatacgcccccagcaatgcccgggcgcgttgcccatcgatcacgccatcggcgtccgagcaccagtcattcagggcgattgccacgtcgtacaacatcgggccggagcaggcgttgtagaagtcgatcaggccggtgaggtgcgtgccttcgaacattgcgttgtcgcggaacaggtcggcgtgcacattggcgcgcggcagggcgaggatctcggccttgtgcgctgcgatctcggtcagggcatcttgcagcaggcgctgctgtgcggcgttcaggtgcgaaatcagttgcgcaccttcactgagcatccagtccaggccgcgatcggtcttgcgttcgaggactttctcgccctgcgtggccaggtgcagatggcccagcaggtcgccgacctgggcgcagtgctgagcgttggcatccttgatgtgcttgccggccagacgcggttgcagcagcgccggtttgcctttgagttcgcgcaaggctacgccgtcggtggtgcgcagggcgtaaggcaccggcaggtcggcgtcgtggagcacgtcgagcagttcgatgaagaacggcatttccgcaaccgggccgcgctcgaccagggtaaggacgaactcaccctgctccaggctgacaaaaaaattggtgttttcgctaccggcggcaatcccctggaagtcgatcaggcggccgaggcggtaaggggcaagaaaggtttccagctcgggccgagccaggggggtgaacacagacatggttaaaactgccagtacgggcgccgcggtgcgcggcgccaattgaagttaagaaatcatttccattcgaagatcttccatgacgggatcagcatatccggctggtcagaacggatgaagttcgcatcggttccgtccgcacgcaccaggaaatacggcggtgcgccttttacagtcaccttgatcgcgtacaggaaaccgttttggcgatattcctggatagttctgtcgccttccgtgcgaatggtcacttccggatcacccgaaggcgcgctgtccgccgccatggcagccatcggagtgagtgcaatcaagccagtcaacagcaggcgattgaatgtacgcatgataaccttgtccctttgtcgtcattggtccggctattctagcgcctgacccgccgaaaaggttgattctgctcatgagccaagcacccctcgtcctggtggacggttcttcctatctgtaccgcgccttccatgcgttgccaccgctgaccacctctaaaggcctgcctaccggcgcggtcaagggcgtgttgaacatgctcaagagcctgcgcaagcagtacccgggtagccccttcgcggtggtgttcgacgccaagggtgggacctttcgcgatgatatgtacgccgaatacaaggccaaccgcccgagcatgcccgatgacatgcgcgtgcaaatcgagccgttgcaccagagtgtgatcgcactgggcttcccgttgctgtgcgtcgaaggcgtcgaggccgatgacgtgatcggcaccctggcgcgcagcagtgcggcggctgaccgcccggtggtgatctccaccggcgacaaggacatggcgcaactggtcgacgggcacattaccttggtcaacaccatgaccggtagcgcgatggacatcgagggcgtgaaggagaaattcggtgtcgctcccgagcagatcatcgactatctggcgctgatgggcgattcgtccgacaacataccgggcgttccgggcattggcccgaagactgcttccggcttgctggtcggcgtgaacggcggcatcaaagagctttatgagcagctggatatcgtgccgaccttgcctatccgtggcgccaagacgctgccggccaagctggaagagcatcgggagagtgcttttctttcctaccagttggcgacgatcaagtgtgatgtgccgttggatgttggcctggatgatctgcacctgaccgagccggatcgcgagaagctgctggagttgtacacgttgctggagttcaagagctggattgatgagatccagcgcgacgccaagcgtttggagctcaaggctgcgccggttgccgaggaagctgttgaggcggcagcaccggcagagaccctctacaccaccatcctcgaccaggcgacgttcgacatctggttgaagaagctcaacgacgcgaagttgttcgccttcgacaccgaaaccaccggtatcgatgcccagcaggcgcagttggtcggcgtctccttcgctgtgcaggcccatgaggcggcctacatcccgctgacccattcctacatcggcgcgccggagcagttggaccgcgacactgtgctgctggccctgaaaccgctgctggaagacccgaccaagctcaaggtcggtcagcacgccaagttcgacatgaacatcctggccaactgcgccatcggtggcgacccggcgcagggcatcaccgtgcgcggcatcgcgttcgacaccatgcttgaatcctatgtgctgaactccacggcaacccgccatgacatggacagcctggccaagaagtacctggactacgacaccgtcgccttccaggacatcgccggcaggggcgccaagcagttgaccttcgaccagatcgccctggagcaggccggcccttatgcggccgaagatgccgatgtgaccttgcgtctgcaccaggcgttgtttgcacagctgacggccatcccgagcctggcgagtgtactcacggatatcgagattccattggtatcggtgttggcccgtatcgagcgtcagggtgcgctggtggacaaggacctgctaggtgtccagagcatcgagctgggcaacaagatggtcgagctggagcgtcaggcgttcgagattgccggtgaagaattcaacctgggctcgcccaagcagctcggcgcgattctttacgaaaaactcggcctgccggtactgaaaaaaaccggcaagggccaggcgtccaccgccgaagaagtgctggccaagttggctgaagatgactacccgttgcccaaggtgctgatgcagtaccgcagcatgagcaagctgaaaagcacctacaccgaccgcctgccggaacagatcaacccgcgcacagggcgtatccacacctcctatcaccaggcggtggcggcgaccggccgcttgtcttccagtgatccgaatctgcaaaacatcccggtgcgcaccgccgaagggcggcggattcgccaggcgtttgtcgcgcccaacggctataagctgctggcggcggactattcgcagatcgagctgaggatcatggcgcacctgtccaaggacgaaggcttgatgaacgcctttcgtcacaacctggacgtgcacaccgccacggccgccgaggtgttcaaggttgagctgggcgaggtcacctccgaccagcgtcgcagtgccaaggcgatcaacttcggtctgatctacggcatgggcgcgcagaagctgggcaaggatattggcgtcgataccaagacggccaaggcctacatcgatgtgtatttcgcccgttatcccggggttcgcgagtacatggagcgcacccgcgcccaggcggcagaccagggttacgtggaaaccttcttcggccgccgcctgtacttgcccgacatcaactccaacaagccccaggagcgcgcggccgctgagcgcaccgcgatcaacgcgccgatgcagggcactgccgcagatatcatcaagaaagccatggtgctggtggacaactggctgacggattcgggcctggatgccaaggtgatcctgcaggtgcacgatgaattggtactggaggtgcgtgaggactcggtggcggaggtcagcgagaagattcgcgagcacatgagtgcggctgcgaagctggacgtaccgctgctggtggaagtgggtgtgggcaataactgggatgaagcgcactgatttgcgggctctgccatcgcgttgagtggtggcagagtgctttagtgcggaaatcactgtcggttatttcaaatagtttttctggcctgccggaacttaacccgtgaactgctactcagagttactgaatgggtggtgaagcccttcaatgctcctatgttgtgttaagtgttggcagatatctggaccccgccctagcggtccggaacttgaaccccgaacttcccctccccatacgaagtccggggttttttttgcctgcagaaaagttattccgcgagttccgcgcccttgtccgccaattccatccagccagccagcacggtgtaagcctcttccaggcccatgcgctttggtgccgagaacagctggatagtgatcgcgtcgccccagcctttacggatttcggactgcactttgagcaaggtgttcttggccgcgccgtaggtgagcttgtctgccttggtcaacaggatatgcatcggcatgccgctggcgaccgtccaatcgagcatcaacaggtcgaaatcggtcatcggatggcggatgtccatcatcagaatcaaacctttcaaactctcccggccacccaggtaagcctccaggtgacgctgccagtgcagcttcaacgggataggtacttttgcgtaaccgtagcccggcaggtcgaccagacgccgatcatcgtctagcttgaagaaattgaggagttgcgtgcggcccggggttttcgaggtgcgtgccaggctggcgtgagtcagggtgttcagtgcgctggacttaccggcgttggaacgaccggcaaaggcgacttcaaagccttcgtcatcggggcattggtcaactttggcggcgctgagcatgaacgtggactgttggcacaggccgaggatgggattcttgagttgcatgagatttccgatgtgggcggtgccgagaaagggtgcggcaagcggtgtcgtttccgtttcagtagcgccagtatataatgccgcagattttgtgtgtgctttgtcccagcgaaggatgaagttcacgggagcgatagacctttattgcgcattagaacgcaaaacgctctcaaaccctgaaatggtcgacgtatgaccaggtggttgctcgctatcggtgtcctggtcccgctttgcggcgctcaggctacacaggatccggaagcggtgtacaaccgagtttgcgtggcttgccatgccggccagttgcccaacgcccccagacggggtgaccaggcagcctgggcgccaagactggcgcagggcatggacacgctggtgcaacacgtgacccagggtttcaaggcaatgccgccgcgtggtttgtgcatggactgcagtactgaggattaccaggccatcattgaattgatggtgagtaaacccggtagataactcttaaaccccttagccgtagttggattagctgatgaacaaactgatcgtgagtctgctgttgaccttgggcatcaccggtgttgcccatgctgcaggcgacgctacagcgggccaggcgaaagccgccgtatgtggtgcttgccatggaccggatggtaacagcccggcgccgaacttccccaaactggccggccagggcgagcgttacttgaccaagcagatgcaggatatcaagtccggcaagcgcacggtcctggaaatgaccggcttgttgaccaacctcagcgatcaggacctggcagacatcgcggcgtattttgccagccagaaaggcagtgtgggagctgctgatccgaaactggtggcccgcggcgagaaactattccgcggcggtgacctggacaaaggcctgcctgcctgcaccggctgccattcgcccaatggcgcgggcatcgccgctgccggcttcccgcacttgagtggccagcacgccacctacatcgccaagcagctgactgatttccgcaaggaagaggccgggcgcacaaacgatggcgacgcagcgatcatgcgcaccatcgcgcgcaagctgagtgacgaggacattgcggcggtctccagctacatccagggcctgcactgaggtgcacgcaacgttaacactcgattaatcccgtgatgcaagcataaaaagggtggcccaggccgcccttttttgtggccggtgccgttacactaacgaactcatgcccgcgtagacctgtcacaacaaaggtcgcgtgaggcgactttatttgtccaggagtaaagcatgcgtaatctgatcctcagcgccgctctcgtcactgccagcctcttcggcatgaccgcacaagctgccgacgtgccgcttgaagccggtaagacctacgttgaattggccaacccggttccggtttccgagcctggcaagatcgaagtggtggagctgttctggtatggctgcccgcattgctacgcttttgaaccgaccatcaacccatgggttgaaaagctgcccaaggacgtgaacttcaagcgcatcccggccatgttcggcggtccatgggatgcccacggccaactgttcctgaccctggaagccatgggtgtggagcacaaggtccacaacgcggttttcgacgcgatccagaagcaaggcaagcgcctgaccaagcctgacgaaatggctgacttcgtggccacccagggtgtcgacaaggacaagttcctggccaccttcaactccttcgccatccagggccagatcaagcaggccaaggagctggcgcagaagtacggtgtgcaaggcgttccaaccatgatcgtcaacggcaagtaccgtttcgacctgggcacttccggtggtcctgagcagaccctcaatgtggccgaccaactgatcgccaaagagcgcgcagccaagtaaggggcccgtcatgcgccgctggggtaccgaacgtgtggttggcctgcatgatccgcaggtcaacgaacatcacctggagtccacgggcctgccggcagacagtcgtctgcgcctgctcagcttcaatatccaggtaggcatcagtaccgagaagtatcggcattacctcacccgtggctggcagcacctgctgccccacaacgggcgtgctggcaacttgcaaaaaatcggcaacctgctgaacgacttcgacctggtcgccctgcaggaagctgatggcggcagcatgcgctccggctatatcaaccaggtggaacacctggcccagctgggtgccttcccctactggtatcagcagctcaaccgtaacctcgggcgcctggcgcagcacagcaatggtgtgctcagtcgcttgaagccctcagtcatcgaagatcacccgttacccggacccaaggggcggggtgcgatcctcgtgcgctttggcgaaggcccggaggccttggtggtcgtgatgatgcacctggcactgggtgcgcgtactcgcacgatgcaactggcttacatccgcgagcttattggcaattacaaacaccaggtgctgatgggggacatgaatacccacgccagcgacctgttgcagaattctccgttgcgcgacctcgggctactggcaccgcaagctgaagccacgtttcccagctggcgcccgcaacgctgtctagaccatatcctgctcagtcctaccctcacactcgagagcgtgcaggtgctggcgcagcccatctccgatcacctgccggtcgcggtagagattcgtctgccgggttcgctcacggctgatgcattacccgcgttgagcccaggcccccgcggaccccttgcatgagcgacgacgcccagcgctggaaagagaaatacctcaagagcatcgagcaacaagagaaactcgaacgtcgctgggctgcccgtctcgacctgctgcgccgtggactggtgcgcagcacgctggcggctgagggcactgatcgcgcagtcgaccaatgcatgaaggaaatgcgcgacgttgtccgtaccgatgacatggacgccgccctcgctgccttgctgccgcgcctggaaaaagctgtgctggactccgagcagcgccgcgaaacccgggtcgaccagatcagcaccgcgctgacgtcgctggtcacgcaactacagaaacttccgttgccccgtgaggtggcccggccgctgaagacgttcgccaagcagttggacggccgcgtcggccaggcgcgagagatcccgctgttgctcagcgagttgagcggcctgcaaggccaggcgctgaacaacctggagccggacggcgaagctgcgcgaccagggcctgggcttttgcagcgcctgttcggtgccaaggaagttgcgaacgaggcggtggcagacgaatcgacaccccgaccggccccgcagcctgcggcagccaagccagtcgctgtcgagccacagccgtccgagcaatccgaggaactgacgcaagcgttgcgtgcctttgcgccgcagcctcaagaaacggtcgctcctgtcatcgagcccgtagcccccacccaggtggtcgagccctccagcgaaacctcggtctatgaagccccgcctcaagccttagcgattgagacacccgttgcgcgtgtcgagcctaagcctcaagtcgaagaacctgcagcggaaagcgccctcgccgccttcatcgaaacgcctgaagtgcaggtcgagaccccggatgagaccaccattggcagcttgtcgctccctccagtgctggaggagcctgatcctgacgagctgcaagcggatggagcctatgccctgcccgactcaccggagccgtcctatagctccgtggccaagcacatcgaagacaccctgctcggcctgctcgaagaactctcgttacccgagcgtcaccgcccccaggccgaagccatgcgcgagcgcctggcccacggcttgaactggtacgagctgttgccgatcctcgacgacctggcagtcttgatgctggcgatcaccgacagcggccagcatgagttcgaggcttacctcaagcagttaaacgagcgcctcgaggcgttccagggccacttgcaagtcgccagcgaggggcatgccgacagccgctccgccgcccgtgagctggacacgcagatccgcgaacaggtcgatggcctgcaaagcagcgtgcaggaagccgccgacctggacagcctcaagcacgtgttggaaagccatctggaggggctgctcggcaccatggatgagcaccagcagcagcgcgacctgcgcgagcaggagacggcggcgcgcctgaagggcttggctgagcgggttgccaatatggagcaagaggcccagggctatcgcgagcacctggaggtgcagcgccagaaggcgttgatcgatccgctcacgggcctgcccaatcgtgccgcctggagcgagcgcctcgattatgaggtgaacacctggcaccagcgcggcaataacctgtcgctggcgatgctggacctggatcacttcaagcgtatcaacgatggttacggccacctcgctggcgacaaggtgctgaagatcatcgccaacgtgctgcgcaagcgcctgcgcccgaccgactttatcgcgcgctttgggggtgaagagtttgtgttgctgatgcccgactcatccctggcggatgccctggccgtgggcgaggtgttgcgtgcggcgattgaagcgtgcccgtttcacttcaagggcgagccggtgacgatcaccgtgtccatgggcgtggcgcagttccagccgggagagcgcagtgacctggcgctcaagcgtgccgacgaagcgttgtatcgggccaaggccgccgggcgaaaccaggtgcaggccgcctgaaagatgttccattttgtgatttgaccgctggctcgcgatcggtacgttacactgttgcattatcgtcttctgcgtaacgtctaccgccatgaaatccttgtacttcgcttttgtgttcattctgctcgcaggctgtgccagcggccctcgcctggacaccagccacccctcggtgaaccacgacaaccgcatgcagttcgtagtcgtgcattacacctccaccaaccttgagcgctccctggccttgctcacccatggtcaggtcagcagccattacctgatcggcgacgacgcctcggccaccatctacaagctggtggacgagagccagcgcgcctggcatgccggggaaagcgaatggatgggccgcacctggctcaactccagctcgattggcatcgagatcgtcaatcctggctacaaggacacacctacgggccgcttgtggtacccctactcagaggcgcaggtgaagtccctggtggtgttgctcaaggacatcagcaagcgcaatggtatcgaccccaagaacattattggccacagcgatattgcgccgttgcgcaagcttgatccgggcccgttgttcccctggaagcggctggccgccgaagggttgggcgtttggccggatgcccaggccgttgcgcgcttccaggtgcaatacgccgccgagctgccaagcgtcacctggttccaggaagaactggcccgcctgggctaccagacgccgcagaccggcgagttggatgtggccacgcgccatgtgatcgcagcgttccagatgcatttccggccgtcgctgtttgatggcacgccagatgcggaaagtgccgcgatcctgcgagcgttgaaccgaagctagagtggcaacgccatatagaactgagtgccctgccctggccgcgagtacacgcccatgcggccgccgtgcaattgcacgatttccttgcacagcgccagccccaggccggcgccgcctttcttgcggcccacctggacaaagggttcgaagatccgtccctgctgcccataggcgatgccttcgccgttatcctcgacgctgacgatcactcgctcgccatggcgccgtgcctgcaggcgtatctgcccgcccgcgggagtgtggcgcagggcgttgcccagtagattgtcgagcacccgctccagttggacttggtccgcatatagccgaggcaggtcggattgggcttccaccagcagttcgatattttgcgcgttggctggctcggcgaagcgtgctcgggcgtgttcgagcagatcggtgacgtcgcacggccccagcgtgagtttctgcagtccattctgatagcgcgaaaagttgagcaggtcgttgatcaactgcatcaagcgctgcatctcttcattgacggtatccagcaagtccgcttcgcgggactccgccgggaacttcgcacgctcgcggaacagcccgaaggccatatgcatgccggtcaccggcgtacgcagctcatgggaggcgcgcaatacgaactcgctgcgcacccgctcgaaggcgcgttgttcggttacgtcgtgcagcaccatcactgcgccaagaatatgcccctgggtatggctcaccggggtcaggctgtaggtcagcagacgcagttcgccctcgacctccacttccaggtcgtccggcgcgcgctccaggttgccgccgcgcagcaccagttgcagttgttcatccagctccggacgcgacaaggcttcgcccaggccttggccgaggcgctcctcgtcccaacccagttggcgctgggccacagggttgaggtgctccaggcgaccttggcggtcaatcatcagtaagccatcgtcgatgctgtcgagcacggcctgcaggcgctgctggccggccagcagttcatcgacattggtcgcctgatgctggcgcagcgcctcggccatgatgccgaagcggcgggtcagctggttcatttccgctgccgaggagatcggcagcgttacctcaaaatccccttgtccgattttatctgccgctttggccagtgcttcgattggtccaccaaaacgccgggcgatgccatgggccgtcacaaatccgatgatcagtacagcaagccccaccaaccccagcaaaccggcgatccacaacgcgcgttcgcgggacttgtgctcgctgttgctgatgttttccaaggcctgcttgtgttcggcgatcaggccattgcgcagcgtgttgaaggtgtcggtgagtttgtccttggcgccgggtggtggcgtcggttgctgggactcgtcaaaggcctcaagcagcgcctgatactggcctcgagcctggctgaagcccgttccgcgaccgtcacgctgttcatgggcaataccctgatccagcaggtcgaagtagcgctgtttcgaggtttgcagcgcctcggggtccgggcgctcctccagcatcatgatcaactgatcgcccaggctctgacgcagcttgaggcccaggtccagagtgacgaagttgctgcgaatcagagactcctgggtcttggccatttgcatgacgctcaccagacccaggatcagacccaacagggcgacggtaatcagcgctgagatgctcaggaataaccgagtgcgcaacttcatcgctagcttcatagggtacagctcacaggttgtactgtttgcgtttgcggtacagggtcgacgcgtcgatgcccagggtgcgggccgcctgatccagggtgtcgctggtagcgagcacggcgcctatatgggctttctccaactggtccaggctgagtgccgcgccaatccgtggggcattgttgctaggttgttcggacatccccaggtggctgatttccaccttctcttgcgggcaaatgatgctggcgcgctccaccacgttgcgcagttcgcgaatgttgcccggccagcggtagttgagcagcgcttcacgcgcttcatcgctgaaaccccgtgctggacgggcatattccttgacgaagcgcgccaggaaccggtcggccaaggtcaggatgtcttcactgcgctcgcgcaacggcggtagatgcaaagtgatcacgttgaggcggtacagcaagtcttcacggaagcggccgtcgcgcaccatgtcttccaagttcaggttggtggcggcgagaatgcgcacatcggcacggcgggtgacggggtcacccacacgctcgtactccttgtcctggataaaccgcagcaacttgggttgcaaggtgaggggaaagtcgccgatctcatcgagaaacagcgtgccgccgtccgcttggttgacgcggcccagggtactttcactggcgccggtaaacgcccctcggctatggccgaacagttcgctttccatcagttctgccgtcagcgacgggcagttaatggtcacgcaggattttttcgagcgcttgctccaaccgtgaatagcgcgggccagttcacctttaccggtaccggactcgcccagaatcagaatgttggcgtctgtcccggccacctggcgcgccgtttccagcaccaccatcattgatgggctgtgagagtcgaggccgtctttcggctggcgcacttcgccctccagggcttcgagccgcgcagacagttggcgcacttccaactgcttggcggtggccaggcgcagttgatcggggctgcagggttttaccaggtagtcagcggcgccggcctggatagcatcgacggcggtatcgactgccgaatgggcggtgacgatcaccacgcgcatccagggcgcctggattcgcatctgggccagcacatccaggccattgtcttcgcccaggcgcaagtccaggaagcacaggtcgaatacctggcgttgcatcaaggcgtcggcctgggccgcgctgttcgcagtggcgacggtgtagccttcatcttccaggcaataacggaaggtgcggaggatcgcggactcatcgtccactaaaagaatgcggccttgaagttccttggctgattccatctgtcccgcgctccttaaactatgaatgatggtgtttagtcccggaataatcgggcaagttgcatggtttattctgatcgataaatagcagtctcgtgcaggtatctgcatcacttcctacaaagccccgtctgatggcgttttcatgccgtcttgccacttcggcaacaccctcttcgttttctatccctcgacccgaccgctggccatcgtgcatttcgcacggcatacacggaggcatcgtgcaggatgctggagggtgcatgagtctttagttcataactatctgattttattgagttttattttgtaaaaaaactggcacgcactctgcaatagctcttccaacgaataatcaaaatgcgggagaacaacagcatgactcgccaaagcctcagcgaactgcgtgtatcgccactgcgcttgcagcaaggtctgtttgccagcttggccctgatggtcacgctgatcggtggccagcagttgcaacattggcagcagagtcagcagcagatcccccagtttgaacgtccggccatgacccagacccatttccgttccgttggcagtgttgctgccgatgcaacagccccgcaattgcggatggttgaccaggcgtcgcccctgagtgagctgccatcccaagagcgttgggtgttctaggcaccaaaggccgcttgtgttgagcggcagcacggcaccacccctgttatttctatagatgcgtaaggagaatcaccatgttgagttgggcaatcacatttctgatcatcgccattgtggctgcagtcctgggcttcggtggtatcgcgggcaccgccacgggtatcgcaaaaattctgtttgtggttttcctggtgatgttcatcgcttccttcttctttggtcgtcgcggccgaggctgaaaatgaccactttgtccttcaaagccattactgccgccctgcttctgggcggtagcggcttggcgttggccgccaacgacggccagtcccgagccaacgaattgctgagcgcggacccgcaataccgtgaaacctggcaagacgtggtgaagaaagaagagcgcctgccggaatgggtgatgaacctgtccggcgccgccgagcagatgaatgccgtggaagaagatggcgacaagtatttggtcgggccactctgcgaaaccgctgacacctgcctgaacaagcgcctgatcgttgccttcagtctcgacaaagaagatgcctacgccatgttggtggaagtcccggccggtctgccgaaggacaagtcgccgacgcggcacgccgattaccggtttatcggtaagccggatgaaggcatgcaaaagctgctgatggagcagctgaagaaagatccgaattggtactaggttccgtctgacacgcttgttgtctgcggggccggcgtccatagaaagaagccgtcgcttctttctgtttgcaccgctcgccaagggtggtgcatgaccaaggggccgggttgctctgatcacctgcgatcggcgtgacctacgggtacagggagtgcctgcgcaagggccgggtcaggcaaaaagctgcggcgcaggttcacaagccaacggcttgctgaacttgcgacgggctttaacgctccttctctgcttctcatgccgcccgtagtcgtgatttccttttttgcttgtgcccaaccattacttggtgtgtcgggtagaccatctatcgataaaatttggtgggcgccataggacatttccgacactaaactgtggaattctcaggcatttccgccaacgctccgcagacgtcctgaatctctgagcgagccgggtttggccggttcacggcatttttgtcggacaaaatgtcacatttgaactgaccgttcggacagttattattaaaaaatctcatgccgattcggcatagggtaggcgtttacggcattagacgtcgcccccttgcatgggaatagttgcgccttttttcgcctgccagtaagccatttcggccacgctgcggtgaccttccatggaggcagatgcacacactttttcgctctcgagcgttgcggctggcgcatttgccttaagttcacttgaagtaagggtaatgacatgaagaaggcaaagctaagcctcgcctggcagatcctcatcggtttggtgctggggatcgcaatcggtgcagtgcttaaccatttcagtgctgaaaaggcctggtggatcagcaatgtgttgcagccagcgggcgatatctttatccgcctgatcaagatgatcgtgatcccgattgtgatttcctcgctgatcgtcggcatcgccggtgtcggtgacgcgaagaaactcgggcgcatcggcgtcaagactatcctttacttcgagatcgtcaccaccatcgctatcgtggtcggcctgctgctggccaacctgttccacccgggcgcgggtatcgacatgagtaccctgggtaccgtcgacatctccaagtacaccgccaccgccgccgaagtgcagcatgagcatgcgttcatccagaccatcctcaacctgatcccgtcgaacatctttgccgccgtcgcccgtggcgagatgctgccgatcatcttcttctcggtgctgttcggccttggtttgtcgagcctcaagcctgagctgcgtgagcctctggtaaccatgttccagggcgtgtccgagagcatgttcaaagtcacccacatgatcatgaagtacgcccccatcggcgtgttcgcactgatcgcggtgaccgtcgccaacttcggcttcgcctcgctgctgccactggccaagctggtgatcctggtttacgtcgccatcctgttcttcgcttttgtgatcctcggcctgattgcccgcctgttcggcttctcggtgatcaagctgatgcgcatcttcaaggatgagctggtactggcctactccactgccagttccgaaaccgtgttgccgcgtgtgatcgagaagatggaagcctacggcgcgccgaaagccatttgcagtttcgtggtgccgaccggttactcgttcaacctcgacggttcgaccctgtaccagagcatcgcggcgatcttcattgcccagctgtatggcatcgacctgtcgatcggccagcaactgatgctggtgctgaccctgatggtcacctccaagggcatcgccggcgtaccgggtgtgtccttcgtagtgctgctggccaccctgggcagcgtgggcattccgctggaaggcctggcgttcatcgctggtgtcgaccgcatcatggacatggcgcgcaccgccctgaacgtgatcggcaacgccctggccgtgctggtgatctcccgttgggaaggtatgtacgacgacgccaagggcgagcgctactggaactcgctgccgcactggcgtaccaagaccgccgcaccggtcgcccaggccacccgcagctgacagcgtgacggcttaaagacaaaccccggaaaattccggggtttgtcgtttctgccagccccgctatcattcgccccattcttcgggggattcaactgatgctcaatggcctgtggcttggcttctttgtcgtggcaatggtgtcggcactggcgcaatggctggtcggcggtaacgccgggatttttgcagcgatggtcgaaagcattttcgccatggccaaattgtcggtggaagtcatggtgctgctgttcggcaccctgacgttgtggctgggctttctgcgcatcgccgaaaaggccgggatcgtcgattggctggccaaggccctcggcccgctgttccgccgcctgatgccggaagtgcccgccggccacccggcgatcggcttgatcaccctcaactttgccgccaacggcctgggcctggataacgccgccacccccatcggcctcaaggccatgaaggcgttgcaggagcttaaccccatacccaacaccgccagtaacgcgcagatcctgttcctggtgctcaacgcgtcgtcgctgacgctgttgccggtgaccatcttcatgtaccgcgctcagcaaggtgccgccgacccgacgctggtgttcctgccgattctgctggccaccagcgcatccacgctggtggggctgctctcggtggcgatcatgcagcgcctgcggctatgggacccggtggtgctggcgtacctgattccgggtgcgttggtattgggcggctttatggcgctgctcgcgaccctctccgccacggcgctggccgggctgtcctcgatcctcggcaacctcacattgtttggcctgatcatgctgttcctggggatcggtgcgctgcgcaaggtcaaggtgtacgaggcgtttgtagaaggcgccaaggaaggctttgacgtagccaagaacctgctgccgtacctggtggcgatgctttgcgccgtgggggtgttgcgagcctctggcgcgttggattttggcctggaaggcattcgccatgtggtcggctggacgggcatggacacgcgctttgtcgatgccttgccgaccgcgatggtcaagccgttctccggcagcgccgcgcgggcgatgttgatcgagaccatgcagacccagggcgtggacagctttccggcgttggtggcggcgacgattcagggcagtaccgagaccaccttctatgtgttggcggtgtactttggttcggtgggtattcagcgggccaggcatgccgtgggctgtgcgttgttggcggagtttgccggcgtcgttgcggcgattgcggtgtgctactggttcttcggttaaggctcggattgctatcgggggcaagccccctcccacatttgaatgtgttcacagatcaacctgtgggagggggcttgcccccgatgaggccctcagtgtttagctgcactattgccttgctgaaccacccactccaccacctgcttattcaactgatcccccgcctgtccaaacccagccaccaccgccggcactttggtgtcccccaccggctggtgcacttcgaaccgtcggctggcaataatccgctgatcacgcccgcgcaccaggcgcgcatccaggcgaatcaccacctccaccacactgccatgatattcactctggaacgcctgcaattgcccgcccagttcatagtcggactgcaggttagtgtcatcggtgctcagcagcgtcacccggccatcgcgctggaagccatccataaagcggttgcgcaacagcaccggcgccgggtcgctccagcgtgagttggcatagctgctgatcaggtcgccattgggcaccacggcgatgcgtgggctgtcgagaaactcgctggtctgcggcttgttcacgcgcagtgaccaactgaccggcgcgccctggctggtggtctgcgccgaagccaggcgatacacgtccgaagggtcagccttgggcagaatcgaacacgcgctcacgagcgccagtgctagaggggcaatcagttggtaagcacgcttcatggcgtgaactccttgttcttgtcgctgcccagcaggtaaccgctggggttggcttccaggcggcgggagatggcgcgcagcgagcctagggtttcgcgcagctcgcgcaccgccggcgccagttcgttgaggccttgcatgccgctgttcaccgagtccttgttgttggtcagcaaggtgttgatggtcgcggtgctttgttcaagggatttcatggcctgctcggcgctgccgaaggcctgcttgccttgttcgttgagcaagccattggcgttgcgcatgagcacggtggtctgttccagggcggcggtcgcctgtttgctcacctgcatcagttgctgcatcaccactttgatatcgccacgctgatcggcaatggcgccagtggtttgctgcaggttctccagggtgttgctcaggcgctcgacgttctcgcgggagaacatgtgattggcgttgtgcaacagcaggttgacgctggtcatcaggtcgttgctgttgttgagcaagcgtgcgatgggcgatggcgaggcgatgatctgcggcaggttgccgtccttgcccttgagctcggggctttgcggggtgccgccgctgagctggatgatcgaggtgccggtgatgccggtcagggcgagcttggcctgggtgtcctccttgaccggcgtctgcccggccaggcggatgcgcgccagcacgcggcgcgggtccttggggtccaggctcaggctgatcacatcgcccaccttgatcccgctgtactgcaccgagctgccctgggacaggccgctgaccgcctcgttgaagatcacttcatagtcctggaaggcgctgtcgacgctggacttggccagccacaggccgaacagcatcgcgccgaccaccacgatcacgctgaacagaccgatcatcacatgatgggctcgggtttccatgtcatacctcgttgagcgattgagcggcatccaatgccgcgcggccacgggggccgtggaaatattcgtggatccatgcgtcgtcggtttccgagacaacatcgatggcatcggccaccagcactttcttttgtgccagcaccgccacgcggtcggtaatggtgtacagcgtgtccaggtcgtgggagaccaggaacacgctcaggcctagcgcatcgcgcagggtcaggatcagttggtcgaattgcgccgcgccgatcgggtcgaggccggcggtgggttcgtcgaggaacagaatgtccgggtccagcgccaacgcgcgggccagggcggcgcgcttgatcatgccgccggacagcgaggccgggtatttgtcggccgccgacagcggcagcccggccagggccagtttgacggcggccaagtgctcggcgtcgcgacggctgaggccggcgtgttcgatcaagggcagcgcaacgttttcggtaacggtcagcgaggaaaacagcgcgcccttctggaacagtacgccaaagcgccgttctaccaaagagcgttcgtgctccggcaagctcggtaggttcttgccgaacacccgcacctcaccttcgctgggacgacgcaggccgacaatgctgcgcaacagcaccgacttgccgctgccggagccgccgaccactgcgaggatctcgcccttgtacaaatccaggtcaaggttttcatgcacgctctggctgccaaagcgattgcacaggccgcgcacttcaatcaccgcctcactgggcgctcggtgtagacggctcaccagcccatctccatgaaaaacagcgcggcgacagcatccatcacgatcaccacaaagatcgattgcaccacgctggaggtggtgtgggcgccgactgattcagcgctgccgctgaccttgaagccttccaggcaaccaatcgcagcgatcaggaacgcaaagatcggcgctttcaccatgcccaccaggaagtgctgcacgccaatgtccgattgcagcagcgagaggaacatcgccggcgaaatatccagggccaccgcgcacaccacgccgccgccgatgatgcccgagagcatcgccaggaacgtcagcatcggcagcgccaccagcagcgccagcacacggggcagtaccagcaactccatcgggtccaggcccagggtgcggatcgcgtcgatttcttcgttggccttcattgagccgatctgtgcggtaaaggcactggcggtgcggccggcgatcaggatggcggtgagcaagacgccgaattcccgtaggaaagagaacgccaccaggtccactgtgaagatcgtcgcaccgaagctcttgagcacggtggcgccgaggaaggctactaccgcacccaccaggaacgtcagcaaagccacgatgggcgcggcatccagtccgacctgttcgaggtgcgcaaccattggcgtcacgcgccagcgcttggggcgcaaaatgctacgggcgaaggtttcgagaatcaggccgacgaaacccaagagtttcttggtgtcctgccagacggtgtccaccgcacggccgatgcgtgcgaggacctggatacccgccgcttcttcaggggctttttccggcacgcaaaaatcattcagggaacggtagacggtcttgagcagcgcgcggtcggcggcagacaagctgcaatcggtttgttcggcggactgctcgatgcgggtcggccccagcagctccaccagcaacgaggcgccggccgtatccagggcgccgaggccgttgaggtcgatgcgcgcgccggcgtcgtattggccgtcgagcttgtccgacagctttttcaggttggcatagtgggcaagcgtccagtcccccgtaatccgcagttgtggtggggtggtggacgtatcgaggtgggctgcgccggccgtcgtgctggtggtcataagctccgagcttgtttggctatccacaattcctacgtaatagcacgatacggcctactttgggttgtccgtttgtgctgagtccgtcaccttgaagcgcagcacgccgatcacttgcccgtcttcggtcagcacccgcacctgccagcggcccacggcgtcggccgggaagttctgcttgtgggtccaggcgcggtagccctctttacgcccgccgtggatatccagggcgatgcggtcgacctcttggccgttgaatttccacacgtggtagatgcgctcatccaggccacgcggcgcgttgatcgcggtataggcatacagcccaccgctgcgcagctgcgcggcagtgacttccttgaggtcgtcgcccggcgtgcggtcctgcagttgggtgctgatggccacttcggtcatccacagggtggctggtggcacccaactgcgcaggagccacccggcgcagccgatggtggcggtgaccccgagcagcatcgcccagcctttgacgctacgcagcggcaagcttaccgccaggcttgggatcgacagtgccatggccacgccgagggccagtttgtaactctcggcggtggtcaggtgcaggatgatcggcaatgccgtgagcagcgcggcgaacagggtcagggtatgcagcgccaggaacagtgagcgcttgggcgccagccacttgtagtacagcgggtcgatgatcgacaccagcgccgccgcgccgagcaagccggtgaataccgattggccgctgttccacgcggtggtgacgaaaaagaacggcagcacaaaaaacagactttcctggtggatcatctgggtcgcgtagcgcagcagcggttcggggatttcgcgcttgaagactttggtgaacagctgggtaaagctgttctccagcatcagccacaaccagctcaccagcatgatcaccgcaatccagctggccatgccctgctggcgatccaccaggatgaagctgcacacacccgagataaaaccgccgagtgcaatcacccctgggtagcgcttcatcagttcgagaacgcgctggattaagtgggtcaggtttggcattcggcgcttcgcagtcttgtaggaaaaatcccagacagaataacgtcttaggccgttgtacggtgggtcattgcacgatccgtttgcgataaacccgcacgccaatcaacacaaaggcgatcagccccagcactccggcgctgatccagctcagcatgtcgtagctgagcagtggtttctcgatgcgccagtaaccgggctgcttgaacacttcgcgcatggcctggttggtctggtccaggctcacggccttgatgcgcttggctgggtcgctgaagtggccgttgttgtattcggcggacgcgctccagtagtagtcggccaaggcgctgttgccttgcacggcccacgcctggcgcgcaatggcggcttgttgcaggcgcgcaaacactgctgggtcgaggccgtccttgagcagtcgggccttgaggtcctggaggacgtgttccgcttcggggaggttttcccgctcaaggtcggcattcaggctgaggaaaccgacgccgccgagtacttcgcgctcgctccagggaccgtaggacaaaccgtgcttgaggcgcagttggcgatacagcgcccagtccaagtagtccttgagcaggtcgtaggtttcatcatgtccgtcatccagcaccggctcggggaacagccagtgcaacttggcgctgttgccgacccagccgtggatcagctcgcgatggctggcagcggcgtgctggatttccggcagcgccggatgctcggtagggtcgaccgggtcgagttggccgtaggtgcgttccaggtaggccggcagcagtttgtcgaggtcgccgacgatgatgagggtcatgttgttgggggcgtaccagtgtgagcgcaggtcgtccagctggtcgcgggtcaggtggtcgacctcagcgcgttcggcgcatttgagccccagttcgacggccaattggttgctggcggtgtggcccaggtcctggcggtccagcaggcgttgcaggtgtgagtagtgaccgccgtcttcgcgctccactacccgcttggccgcgttgatattggcgtcggtcagttcggtgcgggtgatgatcgccagcagcaggtccagcactttgcgctggttttgcgcgggcgcctcgatcacaaaggtggtgtcggcgttgctggtgtaggcgttccactcgccgcccagggcttgcatgcggtcttccagctcggcttcgccgccgccgtcgatgccgctgaatagcaagtgttcgagcaggtgcggcagctctttgtctgcgcagttgaagtcatccaggcctactccgaccaccagacggatggccacatgcccgcgctcggtgcccggtttgagcaacaattgcaggccgttgggcaaggtgtagccctcgacttgcaggcgctcaaaggcaaaggcgtgggcagatcccatgagcaggcaagcgaacaacaggcgacgcataacaagcttcctggcgagtgaggtcatttttaactgacttcacgggccaccgtacgttcagggcgaatgtgtgatgtcggcaatatcttcggcggagagcgcgccggtgtcagacgtttccaacactacataggcactgctgcaaaacaacgagttcaggcgtttcatgtcggcaatcagttccaggtgcagagagctggtttccaggctctggacgatcttgcgctgaaggcggctgacgtgggcgtgggccaggcgccgttcctgggcgcggaagcgacgcttctcgcgcagcaactggcgggcgctttccgggtcggcactgaggaacaccgacaaccccaggcgcaggttggcgatcaactggctgtgcaggccggtgagttcctccaggcccacttcggagaactggcgacgctgagaggttttctgctgctggactttgcgcagcatgcgttcgatcaggtcgccggccagtttaaggttgattgacagttcgatgatctcggcccagcgccgattgtcgtgttcactgaggtcttcccggggcatttgtgccaggtagagtttgatcgcgctgtacagcgcttcgacatcatcgctgaggctgcgcatttcctgggtgatggcggtctgcttgccgcgcagcacttcaagcatggccatgagcatattgtcgatcaggtcgcccaggcgcagggtttcgcgggcagcgttggccagtgccaggctgggtgtggccagcgcggccaggtccaagtggcgtggtttggccttgccattgacctcttcgcgctcaggcagcagccaggcacacaagcgggccatcgggccaatggtcggtaacaggatcaggcaacggctgacgttgtagagcaggtgaaaggtgatgaccatgccttgtgcgctgtagtccaggccatccatccagcgtacgagcgggtcgagcaccgggatgatcagcaacaggccgatcaatttgtacaacaggctgcccagtgccacctggcgtccggcggcgttctgcatgctggtgctgaggaaggccagcacgccgctgccgatgttggcgccgatcaccaggccgatggccacgtgcaggccgatcacaccggcgccggccagtgttgccgtcagcaggacagccgccaggctggagtaggaaatcatcgcgaacagggcgccgaccagggcgtcgagcaggatgtcgccggtcaacgacgcgaagatcactttgacgccctgggcgtgggtaatcggcccggccgcttcaacaatcaattgcagtgcgaggatgatcagcccgaggccgatccccacccggcccaactgccctgctcgcgtttgcttgcgcgacaggaagaaaatcaccccaagaaaaatcagcagcggcgacagccaggacaaatcaaacgtcagcacccgcgccatcagcgcggtaccgacgtcggcgccgagcatggtcgccagggcgggcatcagccccatcaggccctggccgacaaaggaggtgaccagcatcgccgtggcgttgctgctctgcaccatggctgtcaccaggataccggcgataaacgccagccagcgcttggacatgttctgcccgatgacttggcgcaagttggagccgtagacccgcaggatgccggtacggacgatgtgcgtgccccagataagcagggtcacggcggaaagcagattgagcaaggtcagcatgctcggccccccgtgtgggtgcgctcgaaaatgagcgaaggaaagttgccgcgtgccgctctacgtcttgtacttaagctgtagttggcgaatgggttcggcgccagcatcgcatagctaaagtggggattgaaataaaactgtcatgaaatcagctttgtgcggatgaaaaaaaggggcctgtgcaggccccttttttgtctggctcgggattattgacccgggatgtctttgcgcagtttcacaggatcctgctgtttcttctttttcgcgatggcggtgcgcatcttgatgttcactgcttccaccgccagcgagaacgccatggcgaagtagacgtagccttttggcacgtgcacgtcgaaggattcggcgatcagcacggtaccgactaccagcaggaacgacagcgcgagcatcttcaacgacgggtgcttgtcgatgaattcgctgatggtgccggctgccagcatcatcaccaataccgccacgacaatcgccgcgaccatcaccggtacatgggagaccatgccgaccgcggtgatgaccgagtccagggagaacacgatgtcgatgatcgcgatctggatgatggtgtagatgaacttgccaccggcgcccttcggctcgtcgtgggtttcgtcttcaccttccagcgcgtggtacatctcctgggagcttttccacagcaggaacaggccaccgaagaacaggatcaggtcgcgcccggaaatgccttggccgaagaccacgaacaggtcggcggtcagttgcatcacccaggtgatcgacagcagcaacaggatgcgtgtgaccatggccagggccaggccgaagatccgggtgcgtgcctgcatgtgcttgggcatgcggctgaccaggatcgaaatcatgatgatgttatcgatgcccaggacgatctcgagggccgtcagggtgaagaaggcaatccagatttccggattggtcagccattccatgtgtattcctttgagcgagtgttaaaccgcgcaagctgcagcgccgcgcggttgggtgttcgggattatagagtgctgaacagaggaataatccccatcagcaaagcggcgaccattatgcacaggcataccagcactgcccacttgagggtgaagcgctggtgatcgccaaattcgatacctgccaaagcgaccagcaggtaggtcgaaggtaccagtgggctcaacaggtgcaccggttgtccgacgatcgatgcacgtcccatttctgcagccgtgatgccgtagtggctggcggcttcggcgagtactggcaatacgccgtagtagaacgcatcgttggacatgaagaaggtaaacggcatgctcaccagcgcggtgatcaccgccaggtacgggcccagcgcgtcagggataacggccagcaggctcttggacatggcatcgaccatgccggtgcccgacaggatgccggtgaagataccggccgcgaagatcagccccaccaccgccagtacgctgccggagtgggcggcgacgcggtctttttgcatctgcaggcatgggtagttgacgatcatcgcgatactgaatgccaccatgaacagcaccggcagtggcaacaggccggcgatcagtgtgcacatcagggcaaaggtcagggcaccgttgaaccagatcagtttcgggcgacgggcgtccgggaattgcgacacgctgatttcgctgtggtcgatctcgtcgccttgcaggtgcaattcacccaggcgtgcacgttcgcgcaggccgtacatgtaggcaatcaccaggattgcgacgacgccggcggccatggccgggatcatcggcacgaaaatgtccgacgggtccacgtgcagcgcgctggcggcacgggcggtcgggccaccccaaggggtcatgttcatcacgccaccggcaagaatgatcaggccggccatgatccgtgggctcatgccgatgcgctggtacagcggcaacatggcggccacgcagatcatgtaggtggtggcgccgtcaccgtcgagggacaccaccagggccagtacggcggtgccgaccgagactttcagcgggtcgcccttgaccatcttgagaatcttgcgcacggccgggtcgaacaggccggagtcgatcatcagggcaaagtacagaatggcgaacatcagcatcacgccggtgggcgcaagcttggtgataccggccagcatcatcgggccgatctcgggcgcgaagccaccgaacagcgcgaacaggatcggcacgatgatcagggcgatcagcgcggacaggcgcttggtcatgatcaggaacatgaacgtgatgaccatggcaaagccaaggaaagtcagcataggaatactccaggcgtagcgcggctagggaatggcgaaccgggtgcggtcagcgcagaacgaaaggcacgaggcgtacgggtggagttggggcgaacaggcgggtacgggcggacatcgggaatcaccattgttgttgttaacagccggtctgttgccggcagtgggggcgatcctagacgggtaagctttcagccagctttcgctgagtaaacgggtgacgaagggaatgcacgcagtctctggacttacatggaccaaaatgtgggagggggcttgcccccgatagcagggtgcaagtcactgcatgcgcaggctgacacaccgctatcgggggcaagccccctcccacatttgtctgtatttggcttgaggtttttagggcagttcgaggccgccggcggctttgtgcagcttgcgcaagtgttcgcccaccagcttgaggttggcttcacaggcggcaatctcggctgaacgcgaaggctccagcagcgccctcacctccttgtccaattcgccggtcagcgattgcagctgcttctggcgttcggcgctttccgattccaggcgtgtggcttccgaaggttgcggcaggccatagccgccgctgccgagcagctcagccgggcgactcaggaagccgctgttggcgaggatctgttgcagcgtggcattggctttctccatgccaccgttcttcagctcgcgagcaccgaggtagcgttgtttgacttcgtcctgggccagcatcaattgcttgcgaaagctcgcctgctccagcagcagcaacgcggcgctggtgcgcaagtcggcctggtcgaaccacgggcgacgctcctcagcgctcagggacagccagtcttcaacctgggtctgcttgatcggcaggtgtttgcgcagcacatcgaacatcgcctggtagcgttcgcggaaggagtcgaagtgatagcccaggcgcaatgccctgcgtttgtcgtccagtacgctggtgtcggccaggccgcgtgcgctcagcacctcaagcaaaccattgggggtgatgttgtccaggccggtcagttgcgggttggcactgccgctgcgtagcagtttcaggctctcgaccgcgcagttgttggagatgaagaagtagttgccgtcgtagctccaatgcatttcggcggcatgctcgacggtatcgttgatttcctggcgggtcagtttcaacggcaccgaggccaggccgcgcagctcggtcttggtgtattcatcgatcacttgcgccagcggcagcacgaacagccgcgaggggtacttgccgaccaggccatcccagctcgacagctgtacgtcaccgacgaacgcgcggtaggacaagaccagatgctggtccaggtccagccggcagtccggcccgcgtgggcgccccggtgcgcagatcaccaggcgcagcatgctgtggccccagcggctgaccaggttctggttggcctcggccagcaggtagtcgatctcgtagacgcgctccgggtccacatggcccagcggtgttttggcaaaatcgttaccggcgttgaggaacgcgtaggtgttggcgcaggtgtcttgctgcggcggggcccagccgaagtgttccttgtaatagcggaacagcgcgggacggcggcaggcgtagctcgggtcgaggagaaagtactccatgttgaccgccacaaattccaacgggctggtggtttcgtagatgtccgggctgcgggcgacttgaagattatgttgctcgcgctctccgcgacggcctacgtactgcggccagccggccaggtccagcaggcgtggatcatcgctcaaggtaaagcggcggccattctggccgcggcattgatcaggcaggccgatcaggccggtgaggttgttctggcggctgcagcggttgatcagcgtgcggtcttccttggaccacaggcgcgcacggtcatagatgtgggtcagttcatgcagcaccgtagcgagcatttcccggcgcacagtgccgtgaggtcgattggttttctgggtggcggcactgccgtcggtcaggctggcgagcaggttgctgttgaggtccagctcggacaccagggaggcttgcccgtaggcgttctcgggcatcttgtcggtccagccgacatcaatgcgtcgatccaactgctcgacaaagcgcggcggcaaggaacgcatcgcttcgtcgagcaatgcctggctcgcctgttgctcagccgggctcaggccctcggtcttgagccgcagttgcaggctggcctgggctgcgccggcacacagcagcacagtcccggccaggagccaggcgacgattcgcctcacagtgcgaggatggcttcggcgagggtctggtcgctggcgtcgcgggcttccggcaggcgtgtgcgcagagtgtcgaaggcggcttcaaggtgggcgccacggatctcgccgttgctggcgacgaaactggcggcgtcatcgtgggcttcgcgtacgactttggagtcacggatggaggtggtggtgtccgaggtgaaatcaatggtgcggccggaggcgcggacaatgatgttactggtggccaccagggtgtgtgcctgggcgatgtcggccaacaacagcaggccgagggtggcggcgatcagcgggctacgcatggaataactccagagacaaagatggaatacagagatgattattggacgagaattgcttgcgccagttcaaggtcgctggcgttaagttttggttggctgcggcgcaaataatccagcgcagattccagccttgcgccccgccattggccgtcagtggcgataaacgcggcagcgtcatcctgggcggccattatcacttttctgtcgaagggtgcagacgtcaccttgctggtggcgtaggcgcttgcgacggtgctctgggtggtcaggtcaaaggccgaagccaacggtgaccaaccgaacgaaaacaacacagggacgattaaaaggcggtatgaaaaagccatgggactcgacaactgaaagcgagcgccaaggctagcgcaatgcccgggcgagagccagcgcccaggcgttcgccttggcgtcagatagccaggatggcctgggccagttgtgcgtcagttgccgtgttcaattgcggcgcgtgctggcggatctgggccagggcgctttccagtttcacgccacggatggcgccttcgctggcgacaaagctggcggcgtcgtcacgggcagcacgtacgaccttgttgtcgcgcagggacgaagttgcatcggagctggcgtcggaagtggccttcagcgcgccgacgatggagtcggtggtcacgatgaagctggtcgcgttggcgttggcagccagggccaacagggtggcagcactcagcaggcgaagacgggacatgggatgactcctatagatgaacggataaggtggcgcaggccagccattggggatcagacgcctgtactgcacggtttgccacagggtggctggatattaagccgccgcttatccgttcgggaagcgccttgactgcctagtcacgccagaacggcttggacagctcggccattcgatcgccctggctgatgccgacatcggacaattcccgggtatcaagctgcgacagttggcgtcgttcataagcgtggcgtacccatttggcgagggttgaggccgtttggcgtagcagtctcttataaagaggggatggcgtatccatggcgagtacctttcctgaggtcttggaacaccatgttgggtgagttggtgagaccgatacagatacaccaagataaaattgtactgtttaactgttgcatttttttaaactgtacctgtcgctgcgcagagcttctgttttctgttggaaattcgaatgccgcaaacaacaaagcccgcctccggtttcccggggcgggctttgttttgacaaatcaggttgctggcagtggacccgtcaggtcagggccagcgagcgctaaatcagcgccagaacggcttgctcagctcttcgtagcgttgagcttcgctgatacctgcgtcagccagcagacgcgaatccaggcgagccagttggtggcggctggagatgcggcgctgccacaacatcaggttggcgataacgcgcagaggcagggaggcctgggtgtttacagctttttcttcgaagaacagttcggaactgagtgtacgttccatgatgacatccttccgcttgtggcgggattaggtagtggtttaactgatgccaatgatcctcttccggcgcaagactctctagatacagttcacctgtattgtgaggggccagttaactgtttataggcgctgtactgtacggaattggggcaactgtacctgtctgcactgaaatagtgcggaataggtgttttcggtgaggtgtgtgggatatttcggtaagaaatgaccggtacagcagtacagttttttcaataagtggcggtgaagccaccgagctgatgagactgtatttgcatcagctcggatctgtatcaatcacgccttgagcatgtgcccggtttcttccaggttgatgtgccaactcagtgcttcgcgcaggatgtgcggggtatgcccgccgatggcgcaggcggcatcgaagtaactgttcagcgcatcgcggtaggcggggtgcacacagttgtcgatgatcacccgagcccgttcccgtggcgccaggccacgcaggtcggccaggccaatctcggtcaccaggatgtcgacgtcatgctcggtgtggtcgacgtggctgaccattggcaccacactggaaattgcgccgcccttggcaatcgacttggtaacgaagatcgccaggtgcgcgttgcgtgcgaaatccccggagccgccaatgccgttcatcatccgcgtgccgcagacatgggtggagttgacgttgccgtagatgtcgaactccagcgcggtgttgatgccaatgatgcccaagcgccgcaccacctcagggtggttggagatctcctgcgggcgtagtaccagcttgtccttatagtgttccaggttgccgaacacatcggcattgcggcgctctgacaaggtgatcgaactgcccgaggcgaaactgagcttgccggcgtcgatcaggtcgaaggtcgaatcctgcaacacttccgaatacatggtcaggtcttcgaatggcgactcgatcaacccgcacatcaccgcgttggctatgttgccgataccggcctgcagcggaccgagcttgttggtcatgcgcccggcgtcgacttcctgcttgagaaagttgatcaggtggttggcgataccttgggtgtcgctgtcgggcggcgtcaccgtagaggcggagtcggcctggttggtgatcacgatggccacgatcttttccggtgggatcgggatcgcggtgctgccgatacggtcatcaactttgaccagcgggatcggcgtgcgcgtcggacgataggtcgggatatagatgtcgtgcaacccttccaggttcgggttgtgcgccaagttgatctcgacgatcacctgtttggcaaaaatcgcgaaactggccgagttgcccacagacgtggtgggcacgatatgcccttgttcagtgatcgccactgcttcaatcaccgcgatgtccggcaacttgagttggttgttgcgcagttgctcgacggtttccgacaagtgctggtcgatgaacatcacttcgccggcgttgattgccctacgcagggtgctgtcgacctggaacggcatgcgtcgtgacagtacgcccgcttcggtcagttgcttgtccaggtcattgcccaggctggcgccggtcatcagggtgattttcagcggcgacgtcttggcgcgttcggccagggcgtgggggacggccttggcttcaccggcacgggtgaagccactcatgccgacggtcatgccgtcctcgatcagtgcggcggcgtctgccgcgctcatgaccttgttcaacaacgaaggcaagcggatgcgatcacggtacatggattcttatctcaggctacggaagcaaggtgcgcagtttagtgatttcaaataatttcggcccgctaccatggtcgaatgccaggtagcgatttagagcctttggtcgggtttcatgcagcaataaaaaaccccagcctatcgcaggccggggtttcgagtattgcgctgaggcagtgttactcgacggctttgaccatgtcttcgataaccttcttggcatcaccgaagaccatcatggtcttgtccaggtagaacagttcgttatccagcccggcataaccactggccatcgagcgcttgttgacgatgatggtcttggctttgaacgcttcgaggatcggcatgccggcaatcggcgagttcgggtcgttcttggcggctgggttgaccacgtcgttcgcgcccagcaccagcaccacgtcggcctggccgaactcggagttgatgtcttccatctcgaacacctggtcgtagggcacttctgcctcggccagtaggacgttcatatggccgggcatacggccggccaccgggtggatcgcgtacttcacggtcacgccacgatgggtcagcttttctgtcagctctttcagcgcatgctgtgcgcgtgccactgccaagccgtagcctggcacgatgatcaccgtgtcggcgttggtcagcaggaaggtcgcgtcatcagccgagccggatttcaccgggcgtgcttctttagagcccgccgcagcacccgcatccggcgcattgccgaaaccgccgagcagcacattaaagaaggagcggttcatcgccttgcacatgatgtacgacaggattgcgccgctggagcccaccagcgagccggcgatgatcagcatcgagttgttcaacgagaaaccgatccccgctgcagcccagcctgagtagctgttaagcatcgacaccaccaccggcatgtcggcgccgccgatcgggatgatgatcagcacacccagcacgaaggctagggccagcatcagggcgaaggcggtgaggttgccggtgagcataaaggccaggccgagaccgagggtcagcaggccgagtaccaggttcagcttgtgctgcccgccgaactgtaccggtgcgccctggaacaggcggaacttgtacttgcccgacagcttgccgaacgcaatcaccgaaccggagaaggtgatggcaccgatggctgcgccaaggaacagttccaggcggttaccggcagggatcgaatcgcccaggtgtttgacgatgcccagggattgcggctcgactacggcggcaatggcgatgaacacggcagccaggccgatcatgctgtgcatgaaggcgaccagctccggcatcttggtcatttctacgcgcttggccatgaccgaaccggcagtgccgccgatcagcaggccgacgatcacgtagccaatgcctgcggtagccagctcagcaccgagcttatagatgaggcccacggtcgtgagcactgccagcgccatgccgagcatgccgaacaggttgccgcgtcgcgaggtggtcgggtgtgacaggcctttaagggcctggataaagcagatcgacgcgatcaagtagagcgtcgtaaccagattcatgctcattacttcggcgcctcttcttttgctttcggggctttcttcttgaacatctcaagcatgcggcgcgtcaccaggaagccaccgaacacgttgaccgctgcgagcgccaccgccagggtacccatggtcttgcccagtggggtcacggtgagcgcagcggcgagcatggcgccgacgatcacgatcgccgaaatcgcgttggtcaccgccatcaatggtgtgtgcagcgcgggcgttacgttccagaccacgtggtaaccgacataaatcgccagcacaaagatgatcaggttgtagataccgggggagataagctcttccatcgtctgaatccctgcttaggcgtttttgcggatgacttggccgtcgcggcacatcaggcacgcggcgacgatgtcgtcttcgaggttgatttcaaactgcccttctttagtgaagaccagcttcaggaagtccagcaggttgcgcgcatacaaggctgacgcatcggcggcgacagcaccggcgaggttggtcgggccgcagatgatcacgccattttccaccaccacctgatcggcgacggtcagcgggcagttgccgccttgtgccgcagcgaggtcgatcaccacggaacccggcttcatctgcgcgacggtttcagcgctgagcaatgtcggcgctttacggccaggaatcagcgcggtggtgatgacgatgtcggcctgcttggcgcgttcatgcacggccagggcctggcgttgcatccagctggagggcatcgggcgagcgtacccgccgacgccgacggcgcattcgcgctcttcgtcggtttcgtaaggcacgtcgacgaacttggcgccgagggattcgatctgctctttaacggccgggcgtacgtcggacgcttcgataacggcacccaggcgtttcgctgtggcaatcgcctgcaagccagcaacacctgcgccgaggatcaatacgcgggcagccttaacggtaccggcggcagtcatcagcatcggcatgaagcgcggatagtggtgagcggcgagcagtaccgccttatagccggcgatgttggcctgggacgacagcacgtcgaggctctgggcccgcgaggtacgtggcgcagcttccagcgcaaaggcagtgatgccctgctcggccagcttgccgatggtttcgttgctgaacggattgagcatgcccaccaacacggtgccgcttttgatcagcgtcagttcgctgtcgctgggggcgaccaccttgagaatcagctcggcgccaaacgcatcgttggcactgccaatggtcgcgcccgccgtttcataggcactgtcgacgatgctggctttgatgcctgctccgctttgtacagtgaccttatggccctggccgatcagcttcttgatggtttccggggtggcagccacccgcgtttcaccggtctgggtttcgagaggaacaccaatgtgcacgtcaaatctcctgcatgatctttttgcttttgatctttttgtaaaaaggccagtgcaccgcgagtggcacaactggggcggccgatcagcacgatcccgctgaaatgacagcggggcgcggcattttgcaggcgaactttacggccttcaagggattatgacgggtgacgaaaaattaactacaagtcaccctgtgactgattgtcgcaacatgccgaaataacctgttcaaatacatgggcttaaagggccgcaggcgtttttgcaatcttttgtcatggttggtgtgaatagtcggctattggctcgtaatagtcgttcaaagccatgtgaatcatggctttgagccgaatttttcctgaaaaatatagtctgcttaaatgcgacatatatatacatctgtaggactgtattattactgactacaaagtcaataatacggctttggcctttaaacattgatgctgtagcgatgtgactggtcaatgagccagtccctgaaagcgtgaagtgaggcagattcgacttttctgtcaggaatcatcaggtaataagccttcgtactgctcagcgcttcggggtttgcaatcaccaattggccctcgtccagttcgcgctggataaggaacggggggatcagtgcgatccccatgtcatgcatggctgcttgggacaacatcgagaatagctcgtaacgggggcctgtcatgtcgcgtgggatgttcaggtgttgggcgttgaaccattggcgccacgcgtagggtcgtgtggtttgctgcaggagcggcagttctgcaatctcctgggcgctgaactgcgcacggtcacccaacagccgagggctgcatacaggtacaggattttcgcccatcagccggtgggactcggtaccggaccagtcggcatcgccgaagtagatggcggcgtcgaattcggtgtcggcaaagaggaaagggcgtgttcgattcgtgaggttgaccgtgacctcagggtgttggcgttggaagtccttgaggcgaggtatcaaccattgagtgccaaaggtcgggactacggccagttcgatggtgttggcgccctgctgccccatgacggaaagcgtatcgcgctccaccgcatccagttgcgtcgccacgcgacggctataggacagccctgcttctgtcagttttaccccgcgccgtgaacggcgaaacagctcgacacttaaaaactcctcgagactagcgatctgtcgacagatggcgccttgagtgatcgaaagctcctgcgcagccttggtgaagctctcgtggcgggctgccgcttcaaagctcaccaacgcggtggtactgggaattttcctgcgcatataccgtgtcctcacttgccaaggcgcatatacgccatttttggctttttcgaagtgagaaattagcacaaccctatgcggaaacctcgtttgccctacgcgattgccgggcctaggctgcttccacgacttccgatttcttccgcgaggacttattcatggctggcaaggcaagcttcaactggatcgatccactgctgctggatcaacagctcaccgaagaagagcgcatggtgcgcgacagtgctgagcaatttgcccaggacaagttggcgccacgcgtgctcgaagctttccgccatgaaaagactgaccctgcgattttccgcgagatgggcgagaccggcctgctcggcgcgatgattcccgagcagtacggtggcagtggcttgaattacgtcagttatgggttgattgcgcgtgaggtggagcgtgtcgactcgggctatcgttcgatgatgagtgtgcagtcgtcactggtcatggtgccgatcaatgaattcggcaccgaggcgcagaagcagaagtacctgccgaagttggcctctggtgaatggatcggttgttttggtctgacagagcctaaccacggttccgaccctggcgcgatgatcactcgtgcccgcaaggtagagggtgggtacagcctgacgggcgcaaagatgtggatcaccaatagcccgatcgcggatgtatttgtggtgtggggcaaggacgatgctggcgacatccgtggttttgtcctggagaaaggctggaagggtctgagcgctccggcgattcacggtaaggtcgggctgcgcgcctccattactggtgaaatcgtcatggacaacgtgttcgtgccggaagagaacatcttcccggacgtgcgcggcttgaaggggcctttcacttgccttaactctgcacgctatggcatctcctggggcgcgttgggggcagccgagttctgctggcacaccgctcgccagtacacgcttgatcgccaacagttcggccgtccattggcggcgactcagttgatccagaagaagctggcagacatgcagaccgagatcaccctggctctgcagggctgtctgcgcctggggcgcatgaaggacgaaggtacggcggcggttgagatcacttccatcatgaagcgtaactcgtgcggcaaatccctggatatcgcacgcatggccagggacatgttgggcggcaatggtatttccgacgagttcggggtggcgcgtcatctggtcaacctcgaggtggtcaacacctatgagggtactcatgacgtgcacgccttgattctggggcgcgcgcagaccggtcttcaggcgttctattaataggagcacggcatgggcgcgctttcgcatctgcgggtgctggatttatcgcgagtactggcgggcccttggtccgggcagatccttgcggaccttggggctgaggtgatcaaggtcgagcggccgggcagcggcgatgatacgcgcgcctgggggccgcccttccttaaggatgcctatggtgagaacaccagtgaggcggcgtattacctgtcggccaatcgcaataaggagtcggtgacaatcgacttcacgcggcctgagggacaggcgctggtgcgtgagctggcggccaagtcggacatcctgatcgagaatttcaaggtgggtggtctcgcggcttacgggctggactatgaatccctcaaggagatcaacccggagctgatctactgctcgattacagggtttggacagaccggtccctatgcggcgcgtgctggttatgacttcatgattcagggcctgggcgggcttatgagtctgactggccgtccggagggagaagacggtgcagggccggtgaaggtgggggtggcactgactgacatcctcacggggctttactcgaccgtggcgatattggcggcactggctcatcgggatcatgatggaggcgggcagcatatcgatatggcattgctggatgtacaggtggcatgcctggccaaccaggcgatgaattacctgacgacgggtgtgccaccaaagcgtctgggtaacgcccatccgaatatcgtgccttaccaggactttcccacggccgatggcgacttcatcctgacggtgggtaatgacgggcagttccgcaagtttgctgaagtggctgggcagccacagtgggcagttgatccgcgcttctctactaataaggtgcgggtggccaatcgggcggagctgattcctctgatacgtcaggctacggtgttcaagacgacggcggagtgggtgtcgcagttggagcgggtgggtgtgccttgtgggccgatcaatgatctggcgcaggtgtttgccgatcctcaggtgaaggcgcgcgggctggcgatggcgctgcctcattcgttggcagggatggtgcctcaggttgccagtccgataaggttgtccaagacgccggtggagtaccgtagtgcgcctcctctgctgggagagcatacggccaaggtgcttcaggaagtattggggttgggggtggcgaatgtggtcgcattgaaggctgcgggcgtcatctgaatcctatcttctatatagagggcgttaacggcactttattggtggttttttaatcaatgctaactaattgatagaaaagcaaaattaagggttgacggcagattctggaagtctataattcgccccacttccggcgcagtcgaaacggaaaactccttggtaaacaaagagttacgcagaattcgacagcgacttgcttcagttcatcgaagcccagaaggagttggtagagcagtgttgtctggctctattaacgtttcgatcctctcggtcgaaagcggagaaaaagaggtgttgacagcagcgtgtaacgctgtagaattcgcctcccgctaacgagagatcggaagcgcaagtggttgaagttgttgaagaaatcttcgaaaacttctgaaaataatcacttgacagcaaatgaggctgctgtagaatgcgcgcctcggttgagacgaaagatcttaaccaaccgctctttaacaactgaatcaagcaattcgtgtgggtgcttgtggagtcagactgatagtcaacaagattatcagcatcacaagttactccgcgagaaatcaaagatgtaaccaacgattgctgagccaagtttagggtttcttaaaaacccaaagatgtttgaactgaagagtttgatcatggctcagattgaacgctggcggcaggc

SEQ ID NO: 96 - DNA, 62859 bp, Pseudomonas nodulensis; identical to SEQ ID NO: 19

SEQ ID NO: 97 - DNA, 333954 bp, Pseudomonas nodulensis; identical to SEQ ID NO: 20
  misc_feature (25807)..(25848): n is a, c, g, or t
  misc_feature (201635)..(201701): n is a, c, g, or t

SEQ ID NO: 98 - DNA, 301155 bp, Pseudomonas nodulensis
catcattttcaacagcgcagctttgcgttcttctgaatagaaaggcatgaccttactcttgccgcccccggaatacttttaaaaagcggaggacacgacaactaccctgacaccgggggatcttgttggcctgcatgaattggaaatacgtaaggaaaagggggctttctcgaacgtttttgtctctcgccagcacaaacatgcctttcttgaggagctgacaagcatcattgagtcgagcaactttgttttgatcagttgcgttattgataaggtcactcttcgggagcatcaaggtcccgtacataacccctaccatatggcgcttggattctgtcttgaaacgctttatgagtttctcagtgagaaaaatcagcagacagcgttgacccacgtcattttcgaacgacgagggcgtaaagaagataacgcgcttgagttggagtttcgacggatgtgcgacggtgccaatcgtttaggtattcgcctgccatttgacatcgtgtttgcgactaaacaggttaattccacggggttgcaacttgcagatctcgttgcaaggccgataggcatgagtgttctacggcgtggtcaggaaaaccgtgcctttgatgtgctcaagcgcaagttttactgcagcggaggacgaagcaaggtcggtgagggttatgagaactggggacttaaagttttccctaccgcagaaagcgaaaagccccgatgaaactcaccgaggctataacgccgaccgggatcccccagtccatttgcgccagattctatgcttgcgatttttgagtgtcaatgcagagtaattactgctcctcttgcagaatagatgggtgatcagaatcggtactcagcacctgctccggcataccacgagcgccctggcgccgcttcgtaatagcggttattgccgtcgccgacgatcaccgagccgacgtactggcggtcgagcaggttatccaggcgcagggtctggtggaaggtccagtgctcgactttctgctcaaagcgggcgcgccagttgaacacgctgtaggccggcgcagcgtgttggctgttggtgtcttcgacgtagacctggctgcggtacatgccttcgagggcggtgctgacccagtcgcggggcttccagttgagctctgcgaacagggtggtttgcggtacgccgggcaggtagttgcccttgtcgacggcggtgttgccgccgctgacgaagtcactgtcgtaggtagcttgcaggcgggtgtaggcgaggttggcggtccactgttcgctgagttggctttcgatgcccagttcgaagccgcggcgcagggtgcggccggcgttttggtaagtggtgcgaccgccgctggattgctgcaccaccaactcgtcttcggtggtgatctggaagactgcagcgttgatgcgggtgtcctggccaacgcgtgccttcaggccgacttcgtactgtgtactgaccgatggcttgagcgcgaagttaaagccgtttgagctgctggaatacgctgactccgcttgtgtcggggtttcaaagcctttgcccgcgctcacgtagccgtgcaggttgggggtaaacgcgtacatcacgctgaccgagggcgtgttcttctggtaagtcttgctgccgctgtcgttgccgtcgctgagaaaatgatcgtccacgtccatcttcatggtgctgtggcgcaggccggcttgcagggtccagtcgcccagcagccaattggcctgcacgaaggggtcgaggctggtggcggtgtcgatttcatcacggcccagtgcgcccttgacgccgtgcacgccgttggcggtgttggaatagccttggcgatcatcttcgctgcggtcgtagtcgaggccggcgatcaaggtcagttcgcccggagcgctggtgacgggttgtagccagtggatggagccaccgtagaacttgcggtcgaacgccaccacaccgcctcgcacgttggcggggttggtcgcaccgctggggaatttgtcaggaatcgacaagtactgaatcacactccgccgccccgtatacccattcacctgcagcgtcgcatcgccgaagtaccgctcgtaattcatgcccaattgctgatgatcgatacttttgcgcgtgttgtacgtcagcgcgttggcgctcaccgagcgcgggtcggccttgtacgccgcccacgtctgccccagcgggtcctgggtgccgttctgttccaggctgctgtagatcagcgccagtttgctgtcgtcatccggttggacgttgagcttggcgaaggtctggtcgcggcgtgcgctgctgtggtcgcggtagccgttggtgtccatgcgcgaagcgtcaagcacgaagccggcgccgttggtcgcgccttcggcgctcaggtggttcttgttcaggccgtcgctgcccaccagggtttcggcgccgatacgcggcgggccttcgccgtctcgggagaacatctggatcacaccgccggcattgctgccatacagggtcgcggcagggccgcgcagcacttcgatgcgttcggcagtgtcgaggttgaacgtggccgcctggccctggccgtccggggtgctggcgggaatgccgtcggcaatcagcttgatgccgcgcacaccgaacgccgagcgggcgccgaagccacgggaggaaatctgcaggtcctgggcatagttctggcggttctgtaccaccaggccgggcacgcgggacagggcctcggaggcgttgatgcccaattggccatcgctgatctgttcgcggctgatgccgtccaccgagtacggcagggcgaaggtcgggctggcgctgcgtgagccggtgaccacgctggggtcgaggaccagcggggcgtcttcagcccgagcggcatcgctcagggcgaacaggccaggcagcagcaaggtgaagcgggcgaggtttttcatcggtcagcgggaatccatggcgcgcataggcggtagacgcgcaaaggggcgcgagtttagtggctcgggcgatttttatcatttgggaatcgtcctacgctgcaaatcaatgttgctgctttgggtcacctgcccttgcgatgttagcgtggtcagccttggcaataacaatggcagatgggccataaggagagggtcatgaggatggggtcgaaagtcttgtgcagtgtgctgccgcttgtgttggcgggctgcggaaccatcaataccgtgttccggccagacgcggttaccagccagaacctcaaggactcgcgcagtcactgcgaaaacgtgccgcgcgtctacagcggggtgatctacgggttctgcacgctcaatggcgaaccggcgcccgacaagagcctgaaggacaacagcctgatcgaccatagcggtagcatgctacccattgtcgcggtggagtttgtcgcctccggcgtcctggacaccctggtactgccctacaccgtttatcgccaaagccaggacggcagcatcgagatcttccgctgatccctcttgacgctcgtcgctaacagcttcccgccgcttttacgctataatcccgccctttagctgtttcccgcccaggcgggaggcacacttttttcaggcgcaacccgcctgcatgcagactaaaagaggctagacccctgtggcattgacgattcttggcctgtccggcgcccttagccatgatccttccgcagccttgtatatcgacggcaagctgatcgcggccgccgaagaagaacgcttcgtacgtgacaaacatgcaaagaaccgcatgccctacgagtcggcgaagttctgcctggagcaggccggcatcaagccctccgacgttgacgtggtcgcgatcccgttcgccccgatcagcctgttcggcgaggcgcgctggcactacgccaagcgttactggtacgccccggaccgcgccctcgatgcgatcctgatgggcaaccgtcgctacaagcgttatcgcaacaagatcgtctggtgcctggagcaactgggcttcgatccgaagaaaatcaagatcgaaccggttgaacaccacctggcccacgcttccagcgcctaccactgctccggcttccaggagaaaaccgcgatcctcggtatcgacggtaaaggtgagtacgccaccacgttcttcggctacggcgaaaacggcaagatccacaagatcaaggaattctacgatccggactccctcggcggcctgtacggcgcgatcaccgagttcctcggtttcgagatgctcgacggtgagttcaaggtcatgggcatggcgccgtatggcgatgccagcaagtacgatttctcgcgcctggcttcgtttgagaacggtgagttggtgatcaacaccgactacgccaacgtcatcggcctgcgccgttacaaagagaagggcaaggggttctacttctcgccaaaactgatcgagtggctgggtcccaagcgcgaaggcgatatcgccgacgagccgtacatccactacgccgccagcatgcaggcgctgttcgagaaactggccctgcagatgatcgaccactacctgggcgacatcctcaaggacaccggcaagctggccttcgccggcggctgcgcgctgaacgtcaagctgaaccagaaaatcattgcgcgtgacgacgtgaaagagctgtttgtgcagccggcgtccggcgatgccggtactgccgtgggggcggcggcctacgtgtcccacgcccggggtgtgccggtggagaagatggaacacgtctacctcggcccgtcctacagcaacgaagacgtgatcgccgcgtgcgccaagcatgagagcaagccgaactggcgcaagatcgagaacatgccccagcgcatcgccaagatcatggtcgatggcaacccggtggcctggttccagggccgcatggagtttggcccgcgtgcactcggcggtcgttcgatcatcggttgcccaagcgccaccggcgtggcggaccgcatcaaccaccagatcaagttccgcgagcgctggaggcctttctgcccgtcgatgctcgacaccgtcgcgccgcagatgatcaaggtcgaccacccggcgccgttcatgaccttcacctttgaagtggccgaagagtggaaaacccgtgtgccggaagtggtccatgaagatggcacctcccgcgcccaggtgctcaagcgcgagtacaacccgcgctactacgacatgatgaaagagctggaagtactgaccggcaacggcgtgtctctgaacacctcgctcaaccgtcgtggcgaagcgatgatctgctcgccgaccgacgcgctgaacatgttcttcggctccgacctgcagtacctgatcatggaagacatcctggtcgtcaaggacggcgtggacccttatgacgccgtggtctaaatgctgaaccgcttccaggcgtggcgtgagcgtggctggacgcctgtcgaggccgaggtttacgcccaggcctggcagcggtttggcggcagcgttgcgacccatccgcagtttgtcgagcgcttggcgggcctggcgcagattccggtgcgttacctgggctgggaacaggacggtgaactccgaggggcgattgccacctgggggcgcgacctggccttgtccaaggacgtactcaagcgcagcggcaagaaaggcctgtttgacctgggcaatgccgagatcatcctgccgatcactgccgatgcgcagttgccggtgcgccatcgcgggcgttacctgtcagcgctgaacgagggccgcatcagcaccctcaagtcccaggccgagcagttggccatggcgcgtacccccgaagacctgtcgaagaagtttcgctacaaccagcgccgcgaattgcgtctgctggaagaggcgggcggcgtggtgcgggcggtgagcgagttttccagtgtggagctggcggcgatctactgcgatctgttccagcgccgctggggctttcccgccacaggcgccgagcgcctggccgaggtgctggcgctgctcaaagagttcctgatcggctcggtgctgtttctcaacgatgctccgattgccgtacagcttgtgtaccgcgtcgaggcgccggagtggatcagcatcgagtacgtcaatggcggtgtcgaccctgaaacccgggcattcagccccggcagtgtgctgagcttcctcaacacccaaagcgcctgggaacaggcgcgggccgtggataaaccgctgcgcttttccttcgggcgtgccgaccgcgagtacaaggagcgctggtgcaacccggtgccggtgttcagcgtatgagccgcaaacagcaactgctcaagcgccaccggcgcaataaacgcattgccctgctgatcgggctgctgctgttgatcgcggccggtgtgctggtggcctggtggttaccactgatcctcgcggttgtgctgtgggtggcccatgaagcctggtttgccgaccacctgttttattcgcccaaggacgactaccaataccgttttgcgtcgagtggccaacaggtcgggctgcgtctggaaggcggcaggttgctggcagagacgccgctcgagctggctggcgatgaaacgctgatcgtcgaagtgcagctcaaaagcaacctatgggggcgtttgtttgatcctgcagttgaatttctggacgatcgccaggcgttcgaacgtggggtggccggcaaacgttacctcaacctcaccggttcggcggcggcattggtcggcggtgaactgcgcctgcgcggtcgtttttgccgcgtgatcggacagccggtcttgtggctgtttcgccagcctgacgtagcccgtcagcgtgtgatggtgatcgccccccatgccgacgatgccgaactggccgccttcggcctgtacagccaggcggatgaaagctggatcgtgaccctgaccgcgggtgagatcgaggccgagcactatcagcaaatgggtttgcccaaggctgaagcggcgcggatcaaagggcgcttgcgtgcctgggacagcattgccgtgccgcgctgggccggcgtgcccgaggcgcactgcgtgcagttggggtatttctgcctgcaactgccggccatgcgtgacgcccccgatcaaccccaggcatcgcgcgaagcgcagttggacgatacgcggctgttccgccagttcaatgctttggcgttgccgggcgatgtagacggtgcgccgacctggaacaacctgattgccgacctgcgtgcagtgttgctcaaggcgcgtcccgaggtgattgtgttgccgacgccagtgctcgaccctcaccctgaccatatctgcgcccacaccgcggtggtgcaggcattgcaggggcttgagtggcagccgaccatgttgcttggctatgccaaccatctgcacgataacgaccgttggcccatgggtgattcaggcgctggcatcgctttgccgccgcagttcgatgccgcccaggtacttgagccctattgccgggtgctcagcctgagccagcagcaggacaaggccatggcgctgggtatgatgcatgatctgcagccccgtgcaccgttcaagcgccgggtgcgtcgcctgttgcagcaatggctggccggccgtggtccatcgccttacggcgagaacgaatttttccgcaaggctgtgcgccgtcacgagctgctttgggtgctgaagcaggactgaaattgacttttttcgtcgggctgcccgcgtgtagcagcccgattgcctcatggagtgatatgaagcctcgtttcaaggttttgcagttgcagcctgactacaacgtcaaactgaatgacttcgccgatctcggcgagcagatcgtcaaggcgctgccgacggagcggttcgaggtgacgtcagccttcctgagcggtcggccgcagccgggccagccgttgagcgtggcggatcattccaagtatttcgagtttcccgagaaggccctcaaaggcattcgcctgggcgccatgtgggaaatctacaagtactgccgtgagcagaaattcgatgtagtcatctgtaaccgcttcaagtcggtgaacatgatgctgtcgctcaatcgctggttgaagattccgttgtgcatcggtatttcccacggtttcggcgagtacgaacgcgcctatcgccggcgccagacgcgccgcctggtcagcccggcctggcgctttgtcggggtatcggcggcagtcagggattacctgatcggcctcaactgcggctttacccgcgataacaccaccttcgtcaccaatgctatcgatattccccaggccgaagccttgcagttgccacgcgagcaggctcgccaggcgctcgggctgccgctcgacgcacggatcatcggcgcgctggggcgcttggtgccgatcaagggccatacgcacctgctgcaggcgtttgcccgtctcaaggacaaataccccaatgtccaggtcggcatcatcggttccggccgtgccgaagccgacttgcgcgcggatatcgagcgccttggcctcactggccgtgcgcacttgctgggctttcgcgaggatggcctcaaatatgtacgcgctttcgatatctggaccatgccttccttgctggagggcctgggcctggcgttgctcgaaggcatgagtggacgcctgccggtgattgcttccaacgggccggccatgctgccgctggtggaaggggcgggtggtttgtcccacgagcctggcaatgtcgagcaactgacagcggccctggacacttatctggccatgagcgacgagcaattgcgcgccaagggtgaacaggtattccgttatctggaagagaaccacgccctggccgagttccagcaaaagtacctgaacctcatcgaaaccggtttgaaagaagtaggtagagcatgacagcgcaacaacccctggtctcggtgatcatcgcgtcctacaaccacggccggtacatcgaggagagcatcctcagcgtgctcggccagacgtacccgaacatcgagctgctggtggtggacgacggttccaaggatgacagtgtcgagcgcatccagcgcctgcaggccgagcacggctttgatttccaggtgcagcagaaccagggcctgaccgccacgctcaacggtgccatcgcccgcgccaagggtagcctgatcgcacccttcggctccgatgacatcatgctgccagaccgtatcgccacccaggtggcctacatggaaggtaaaccgaaggtgggcatgtgcgctggcaatatcgagttgatcgatggtgacggcaacctgcacccggagaaaaagcagcgccgcgacgtaccgtttcgcagcctggatttcgacgacatgttcatggaccgcaagcccttcccgccggcgccgaccatgttgattcgccgcgaagtgctggaagaagtcggcggcttcgacccactgatccctctggaagacctgctgatccaattgaagatcaccgccgcgggctacaccattgacgcgctcggcgtggtgatggcgcagtatcggcagcacgcaagcaacacctacaagaaccatcgctacatgatccagaacattctcaagacctatgcccatttcagcgagcacccggcctatgacgcggtgcgctacaacttcctcaactcgatgttcctgaagacggctgatcgtgaccggccactggcgcgggagatcctcaagcagatcccgctgaagttctgggggcgcaagaccttgcgtggcttggtgcggttgtacctggcgcccctcaggaagtgaggcggcgggaggtatgaaaaaggcgactatcagcagtgatagtcgccttttttatcaggtggcggggctggccaatgccagcacttgctcgcggatcttcgccgtggcgccttggctggcaacggacgcataacctttggccaactgttcgaagtgtgtctcgaacaaccaggcgcggtcctgtgggtagcgctgcatatggcgcaggttgcgctggcgcaacgcgttgcgcagcggcgacgggaagatgcgcaggtcggcaatatcgatcagggcaaactcaccgtcatccatcaacagcacgttacccaggtgcagcgaacggaagtacacaccgcgctcatgcagcttggccatgaactggccgaaacgttcgatcagcgactcacgcaggctgttgtccaggccttgcagggcctggcgcagggtcaggccgggcagtggcgcgtagctgacggcggtgctggcgtcgcgcaggctatagaggcctagaatctgcggcgtagggatgcccagggtgcgcaattgctcggcgttgctggcaaaccgctcggagtaggggttgaagctgcccgaggtgtaccagcggcgcgcacgaaagatcttcaggaagcggccgtcggccaggcgcaggactttcgggcccagcccgtcggcttcgatcacatgggcattgctgcacagctggtcgaaagctgcgggcttgagcgcttgtaccggcatgcgcaacaggctgtgacggcgctgggcgatgctcaggccggcaatgatcgccaacgggatccacagcacgaaccagtgctctttcgggcgtgacaggatgccacccccttcggtcagcccggcgccgatgccataggtcagcagcgatgaagccaggatgaagagtggctgggcgcgttctttcaggcccttgtacagcccccagccgatcatgaagatccacgggataaagccgatgatgccgacgtaatacagcacgcccagggcaaaactgtgcggctcgcgcagctgatagccgtcggacagggtcaggtacagctcggagtcgtagctgtggccgatccatgggtgttctgcgatgcgttgcagtgacatgccccacagttcaaggcgaaatgagctgcctcgttcggtaatggattccgggtatagcaggagcagtccaatggcccccagaaccaggcctgctatcagcaaagccgagcggcggttgcggctgacgaaggtcatccacaggatggtgagtgtcagggctaccagcggtgtgcgcgagcccgtggccagaaccgccgcgagcatgactgccagagccggggcgctgaaccacaggactttcaggcgctgggtggtcatgcagacatacagccagtagacgcagaagaaaccgaatagatgagagctgagcagcggattgtcgagagcgccacgcccaccgatcatgcgcatgcccggttcgaagcctttgacgaacgccaccaagttgcacaggctcaccaccagtgcgattaccgccgcactgaagaagatcggcttgaacagatcgttgcggtaatgcagcaacagcccgcagccaccaaacagcatgaaggtattgagcgggcgcttgaacaggtcggtgtcggcggtgggctcggggctccacagcaggctggtcagggcccaggcggagaagaccaggaaggcgagcgccaggggctcgcgcagtaacgctttcagctcccgggggcgcatgcacaacatgaacagcgtcggtacgctgaacaggatgtagacaattcgatgcagcacgtttcggttggatacgaagaacagtgagctcagcagcaacaacaagccaatgggtaaaatccacagaaccagaaagtcgaaaacgcgatttgagccatagatcagccgcttggagtgcatacaggaaagccattccgtgttgagaagccgaccatcttaaagtagtggctatataatgtcgccggttgaggccaaccggtttgagggtcatgcagggtgcaagtacaacagagaagctgtgctaaagtcagcctcctttttcaaaacgccgcgtgatatgaccgactccagtccgagcgcaagcccttcgagcttgaaaatatacttccgcctgctcagttacgttaagccctacgccggcttgttcgcgctgagtatcgtcggatttctgattttcgcgtcgacccagcccatgctggggtacatcctcaagtacttcgtcgacggcctttccaaccctgaagccgtgctattccctaccgtgccgttccttcgggacctgcaactgctgcaagccgtgccgctgctgatcatcctcatcgcggcctggcagggcctgggttcgttcctgggcaactacctgctggccaaggtttccctgggcctggtccatgacctgcgcgtgcagttgttcaacaacttgctgacgctgcccaaccgctacttcgacaaccacaactccgggcacctgatttctcgcatcaccttcaacgtgaccatggtcacgggggcggcgaccgatgcgatcaaagtggtgattcgtgaaggcatgacagtgatcttcctgttcgcctcgctgctttacatgaactggcgcctgacgctggtgatgattgccatcctgccgttgatcgcagtgatggtgagcacggccagcaagaaattccgcaagcagagcaagaagatccaggtggcgatgggcgacgtgacccacgtggcctccgaaaccatccagggctaccgcgtggtgcgcagcttcgggggtgaggtctacgaggaaaaacgcttcctcaaggccagccagagcaacaccgacaagcaactgcgcatgacccgcaccggggcgatctatacaccggcgctgcaactggtgatttacaccgcgatggcggtgctgatgttcctggtcctttatcttcgcggtgacgcatcggccggtgacatggtggcctacatcaccctggccggcctgctgcccaagccgattcgccagctctcggaagtcagctcgacgatccagaagggcgtggcgggtgccgaaagcatttttgaacagttggatgaagaggtcgaagtcgacaacggcaccatcgagcgcgacaaggtcagcggccgtctcgacgtacgcaacctgaactttacctacccaggcaccgagcgccatgtgctcaaggacatcagcttcaccgccgagcctgggcagatgatcgccctggtcgggcgctcgggcagcgggaagtcgaccctggccagcctgatcccgcgcttctaccaccacgcaagcggcgaaatcctgctggatggtgtcgagatcgaagactacaagctgctcaacctgaggaaacacattgcccaggtgacccagcatgtgaccttgttcagcgacaccgtgaccaacaacatcgcctacggcgacctggcgggtgcgccgcgggcggacgtggaagcggccgcggcggacgccaatgccaaggacttcatcgatcagttgcccaagggcttcgacacccaggttggcgaaaacggcgtgttgctgtccggtggccaacgccagcgcctggcgattgcccgtgccctcctgaagaatgcaccgctgctgattctcgacgaggccacgtcggccctcgacaccgaatccgagcgccacatccaggcggcgctggacaaggtcatgcaaggtcgcaccaccctggtgatcgcgcaccgtttgtccaccatcgagaaggccgacctgatcctggtgatggacgacggtcgaattgtcgagcgtggcacgcacagtgagctgctggcacagaacggctattacgcccgcctgcatgccatgggcctggatgcgccgatttccgcagacattacctgaacctcccggtaggagccggcaagccggctccttgcaaaaccctcccgcaaacctcccgcaaccctgtgctaatatcgcgcccctgttcattttgtatgtgggttgctccatgaagttgtccatgccgcgattcgatcaagcccctgtcttggtggtcggcgatgtcatgctcgaccgttactggcatggtggaacctcacggatttcccctgaggcgccggtgccggtcgtcaaggtcgagcaaatcgaagaccgtccaggtggcgctgccaacgttgccctcaatattgccgccctcggcgccccggcctcgctggtcggcgtgaccggcgacgacgaagccgccgacagcctggccaacagcctgcgcggtgctggcgtgcgtgcgttgttccagcgcattgcccaccagccgaccatcgtcaagctgcgggtgatgagccgtcaccagcaattgctgcgtatcgatttcgaagaacccttcgccaccgacgccctggcccttagcggccaggtcgatcagttgctcgaaggcataaaggtgctggtgttgtccgactacggcaaaggcgccttgaagaatcaccaggaactgatccaggccgccaaggcccggggcatcccggtattggccgatcccaagggcaaggacttctcgatttatcgcggagccagcctgatcacgccgaatctcagcgagttcgaagccatcgtcggcggttgcgccgatgagcacgacctggtgaccaaaggcgcggcactgatggccgacctcgacctcggcgccttgctggtgacccgtggcgagcacggcatgaccctgctgcgccccggccacccggcgatgcacttgccggcacgtgcccgtgaggtgttcgacgtcaccggcgccggcgacaccgtgatttccaccctggccgcctcgattgccgccggtgaagaactgccccacgctgtggccctggccaacctggcggcgggcatcgtggtgggcaagctcggtaccgctgccatcagcgcgcctgagttgcgccgtgcgatccagcgctccgaaggctcggagcggggtgtgctgagcattgagcaattgctgctggcgattgacgatgctcgcgctcacaacgaaagcattgtgttcaccaacggctgcttcgacatcctgcacgccggtcacgtgacctacctggaacaggcccgcgcccaaggcgatcgcctgatcgtcgcggtcaacgatgacgcctcggtcagccgcctgaaaggccctggccgtccgatcaacagcgtcgaccggcgcatggccgtgttggccggtctgggcgctgtggactgggtgatcagcttccctgaagcaaccccggaaaacctgctggcccaggtcaagccggatgtgctggtcaagggcggcgattattccgtcgaccaagtggtcggggcagatatcgtcagcgcctacggtggcaaggtcaaagtgctgggcctggtcgagaacagctcgaccaccgccattgtcgagaagatccgcaacaatgagtaagcaggttcttgtcaccggcggtgcgggctttatcggctcgcacctggtcgatgcgctgctcgccaaaggctacggtgtgcgggtgctggataacctctccaccggcaagcgcactaacctgccgttggacaatccgcgcgtcgaactgctggaaggcgatgtggccgatgccgagctggtcgcccgtgccgctgtcggcgcagccgcggtggtgcatctggcggcggtggcctcggtgcaggcgtcggtggatgatccggtcagcacgcaccagagcaacttcatcggcaccttgaatgtctgcgaagccgtgcgcaaggccggcatcaagcgcgtggtgtatgcctccagcgctgcggtatacggcaacaatggcgaaggcgcttccattgacgaagccaccaccaaggcgccgttgacgccctatgcgtccgacaagttggccggcgagcactacttcgatttctatcgtcgccagcatggcctggagccggtgatcttccgtttcttcaatatcttcgggccacgccaggatccgtcatcgccgtattccggtgtgatcagcatcttcagcgagcgggtgcagcagggcgtaccgattgccgtgtttggcgatggtgagcaaacccgcgacttcatgtacgtgggcgacctggtggacttgttggtgcaggcgattgaagcgcccgaggctcccttgggtgcaatcaatgtcggctggaaccgcaccacgacgctcaaggatgtgctgcaagccttggaagacatcgtcggcaaactgcccgaagtgacttacgggccggcgcgctccggggatatccggcattcgcgggcgaacaaccagcggttactggcgagttttaccctgcccgaacccaccccattgaaggtgggattggaacgcttgctcaaaggctgacgcgatgtgtagcctgattcaggccttggtttttttcttcggcacgatcttgcgcagcaccctttgggccaggcgcttcaatttcgactctttctcaggctcagccaggccttgctggcgcagccagtccttccagcgaatccgctcctcacgcaccaaccagccttcctgctgggcgaagctttccgccaggtacaaaccccgcgtgctcgccgggtacagctggtctttcttgacggtgtagagctcggccaggggctggccgtctttcaatggcatcaggtacaggtccgggcgttgacggtccaggcgggcgaccagttggtcgccttcaaggcgctcgtcgacatggaacaggctcagggatttggcttccttgggcacttccaggcgcaggtcatagatcaattgcaacgaggcggtgggcaggtgcacataggcgcgcgggcgttcgatcaactgggtggtggcgcagcgcaccgggcgagccgcgccggacagcgggctgaggcgaaagggcagggcttcgcggtaatgcagcgcggaggaatagggcgccggcagccaggtgtcgttgaagcgcccgcccagccagccttccggcgtttccagcaggcactcttcggcaatttcctggatggcggtgtgcagcggcaggttcagctcatgggcgggcacgtagccggagatcagtttgagtaccacgtcgccacggtcctggcggcgctggcgcaccagcacccagtaatccttgttttgccaatgcagggtcaggcgcaccgacacgccaaggttggccagctccagggcgaaacgctcggggtctgccacctccaccggcttgcgccgttgcagggtctgggcaaagttgagcggcatgccgacgctctggtagctcaggccttcgggggtggcttcgacgtgtagcggcagtgtcttgaagttgctggggttttttcttatgagcgttcgcggcatgtcggctccttcttgcgacggggtcggccgcgtcggcggcatcagagttgacgaatgacctgggcagcggtcgccacgttatgggccaggtgcagcggattaatggtcccgacaatagcactggcaacgcctgtttgcgcaaacaacaacatgaaactggcgcgaattggatccattccaggctccaggcaaacgtggccgctggccaaggcctttttcaccaggatgcccttgccgtgggccgccgcatattcaatgacggctttctcggcctgttcgttcaaattgtaggtgaccatcgcgcaatcgccctgttccagagccttcacgccaccctcgacggtcttgccggaaaagccgaaaccacggatcttgccttcctgtttcagcgccgccagggtctggtagacctcgcagtcattgaggatatgcaggtcgttaccgtcagagtgcaccagcaccaggtcgataaaatcggtttcaagtcgtttcaagctgcgttcaatcgacattcgggtgtgggccgcgctgaagtcgtggctggacgcgccattctcgaactcttcgccgactttgctgacgatcacccagtctttgcgctggccgcgcagcagcggccccaggcgttcttcgctcatgccgtaggccggcgcggtgtcgatcaggttgatgcccagttcgcgggcctggcgcaacagcatgcgcgcttcgtcgtcgccggggatctggaagccgctggggtatttcaccccttggtcgcggcccagcttgacggtgcccaggcccagtggcgagaccatcaggccggtgctgcccagggggcgatgaaggtcgtgcagggtaggcaggctcatggcaacagttgctcccaggcaggcacgccgatggtgggttttggcagctcgggcagcggctcgtcgacgcttgggcggatgccgtcacgttccaggctgttgatcacccgatcggcgaagtccggtgccaacgccaacttggtcggccagcccaccagcaggcggccttgttcggcgatgaaggcattgtcggggcgggtcaggcccgattgcaggggctcggcgcggtcgacgcgcagggtcgcccattgggtctggctcatgtcgatccacggcagtaactgcgccagctctttttgcgccgtagcgatctgttcctgcggcgtgcgcgccacgccatcggcctcggcaatatcgccgcccatgtaccacacccaattgccatcggcggccgggtgagtggtgacagtgatgcgtggcttggtgccgccgcccaagcagtgggcatacagcggcttgaggccggggcctttggcgatgatcatgtgcaatggacgtttttgcatggctggctggctgatgcccagcgcggtcagcagatcagccgtaccggcgccggcactcaacacgatgcgctgggcgcggatctcgcgaccgtccaccttcaagcccaccaaagcgtcgccctccagcaacggttcgatgtgctggccggcgagcaagccatcaccggccagttgggccaggcgctcaatcaggcttggcacgtcgatgaccagctcggccaggcgatagaccttgcccttgaaacggcggtcttgcagcgccggcggcaaatcgtcgcccttgacttggtcgacacggccgcgcacggccttgctggcgaaaaaactggtgaggttgccggcaagcgtgccgggggaccacaggtaatgcgcctcggataacaagcgcacgccgcgcaggtccagctcgccgttacccgccagtgcttcgcgccagcggcgcggcatatcggcaatggcttcggacgcgccggtgatggcgccatgcagggcgtatttcgcgccgccgtgaatgatcccctgggacttcacgctttgcccgccacccaaggtggcgttttccaccactaccgtggaaaacccctggcggcgcaggcgcgcattcagccagaggccggcaaccccggcgccgacaatcagaacgtcggtggaaataacggatggcatgggcgacctcagtgttcaagacaagaggcgcagtatacaggctgttgaggagtggtcagtgcccggcggttttcgagaacagctggatcaccaccacgcccagcacaatcaggcccatccccagcatcgccggaacatccagcttctgcccgtagataaacaacgccgcgatactgaccatcacaatgcccattccagcccacaccgcgtaggccacgcccaccggtacggagcgcaccaccagcgtcagcatccagaacgccacgccgtagccgacgattaccagcagcaatgggatgggcgtgctccagcccttgatggctttcatggaaacagtggcgatcacttccgagcagatggcgatggccaggtagtagtaggcggcattcatgggtcagtcctcgggtaaagcgatcagtcaaggctggcattctagagtcttgtcagatggggtaaagtcattacctatccgagtcagagatgggttaggtcatgagcgtgcagtgggatctggaacagatgcgcctgtttgtcagcgtcgccgaacagcgttcgttttcagcggtggcgcgccagcagcgcaaggctcagtcggcggtcagcaatgggattgccatgctggaggcggacctgggcgtcagcctgttcgagcgtagcagcggccgccagcctcggctgaccgcagccggcagcgtgctgctggaggaagcgcgcgaagtgctgcgccagtgcgagcggctcaatggccgggcactgtcattgacccgtggcgaggaagcttgcctgcgcctggcccaggatgaagccatgttgttccaaccggtgctcgacagcctggaggcgttggcgggccagtacccattgctggaggtgcagttgtccagcgcggcccagggtgatgtggcgcgcaagctggtggagcgcaaggctgacctgggcctgctgttctatcacgaccagatccccgaagccctggagcggcgcgtggttggcagcgtggagatggtcacggtatgcggggtgaaccacccgttggccaaggaaacctatgtaacgtgccagcacctggcgcagttccgccagttgctgatgtcgacccagaccagtgtctaccccggcagcgaagccgccagcccgctggtgtggcgcgccgacagtttctacgtgttggccgaatggctgatgagtggcctgggctgggcctggctgccccggcatatcgtgcagtacccgacctaccagcaacagatggtcgaactggacagcgaatggacgccgccggcgctggtggtcgagttggtctggcggcgcgacgagcatctggggccggcggcgcgcttcctggccaaacgatttgccgagtgcttgcaggcgatcgactgaaaaagccgataaactccgccgccatgaatagaactctctacagctgtctgttttacctggcgctgcccttggtggctttacgtctgtggctgcgcgcgcgcaaggcgccggcctatgccaagcgcgtcggcgagcgcttctcctatggcttgccggtgatgcggccgggcgggatctgggtgcacgccgtgtcggtgggcgaaagcattgccgctgcgcccatggtgcgcgggttgctggagcgttatccgacgctgccgatcaccgtcacctgcatgacgccgaccgggtccgagcgcatccaggcgttgttcgccaatgaaccgcgaatccagcactgctacttgccgtatgacttgccgtgcgcggccgagcgtttcctggatcgcgtacagcccaagctcgcggtgatcatggaaaccgagctgtggcccaatcatatccacgcctgcgcccagcgcgggattccggtggcattggccaatgcgcggttgtcggcgcgttcggccaagggctatgcgcgctttgccaggctgaccgcgccgatgctgtcggagatgagcctgtttgctgtgcagacgcaaaccgaagcccagcgcttcctggacttgggcgctcggccggaaaccgtcgaagtcaccggctcgatcaagttcgacctgaccatcgatccccagttgccggtacgcgccgccgcgttgcgcgcgcaatggggcgccagcgagcgtccggtgtggatcgccgcgagtacccatgagggtgaagatgaggtggtgctggcggcccatcgccaactgctcgacagctaccctaacgcgctgctgattctggtgccgcgccatcaggagcgcttcggcccgatgttcgagctgtgcgcacagcaaggctttgccacggtgcgtcgctccagtggggaacccgtcaccgcgaacacatcagtattgctcggcgacaccatgggcgagttgctgtttctctatgcgttggctgacagcgctttcgtaggcggcagcctggtggcgaccggtgggcacaacccactggaaccggcggcgctggccttgccggtgatcatgggaccacatgtgttcaacttcctcgaaatcaccgcgatgatgcgtgaagccggggcgttgcgcgcggtggacgatgcagaagggttggccgaagccgtgcgccagttgttcgaactgccgcaggatgcgcgcaagatggcgcaggcggggctcaaggtgatgcaggccaaccagggcgcgttgaagcgtttactggatggtttaggtcgactgctggctgactgaatcatcacctgactcaatgtgggagggggcttgcccccgatggcggtatatcagtcacctatacggtgcctgacactctgctatcgggggcaagccccctcccacatggggttgcagtggattcagttggcggggcgggccttgagttgttcggccgcagccttggccaggtccggcggcaggaagtcgcggtccgggttgtagtcggccttgaggtagcgcgccaggtcttgcagatcgcctgggttcaaggtgcccgcggcctgcttcaagcgcaggttgtcgaggatgtagtcgtagcggctgttgttgtagttgcgcactgacgcatagagctggcgctgggagtcgagcacgtcgacgatattgcgcgtccccacctgatagccgatttccgtggcttccaccgcgctctggttggagatgatcgactggcggcgcgcctgtacctgctccacgtcggtgttcaccgcgcggtgcaggttgcgggtgttttccaccacctggcggcgcaggccttcgcgctgctgctcggtctggcccagacgcgagtaggactcacgcacctgcgagctggtcagcccgccgctgtagatcgggatgctcaggcgcaggccgatggtgcgctgctcgacatctccacggtacggcgtgccgaaggcattcgggttgctgaaaccgagggcgtcgttgtcgcctttttcatattgcgccacggcgtccaaggtcggcgcgtggccggccttgcgctgcttgagggtttcttcggcggccgtgaccgcgtagttgctggccagcaggttcaggttctggcggccggcggtttcgacccaggccttggcgtcgttcggcagcggcggcagcaccggcagcgtgtggacgatgccctggattgagttgtactggcggttggtcagggtgatcagcgcttcgaacgcgtcctcgacctggcgttgggccaggatgcggttggcgcgggcggtgtcgtagctggcctgggattgcagcacgtcggtcttgtccgacaggcccacgtcaaagcgctcgttggactggtccagttggcgcttgaacgcattttcttcggccttggtcgaggccaggttgtcctgggcgcgcagcacggcgaaatagttttcggcgctctgcaggatcaggttctgttcggtcgccgacagttgcaacgcggcctgctcattggtggcctcggcggcttgcagctggaaccagcggtcggcgcggaacagcggctggctaagggtggcgcgccaggagtgcgcatcgcggttggcggtggcggccggggtgtcgatctgggtgcgcacgttgttgatatcggcaccgccggtcaggttcggcagcaagccggcacgggcctggggcaccacttccttttgcgcgccgtactgggcacgggcggcggccaggtcggcgttgttgtccaccgcttcctggtagacgctgaccaagtcggttttggcggacaagggcgcttcagctgcccagaccattccgttggtcgcacaagacacggcaagagccagtgaaagtttgcgcagcatgaggcgatccctagtttgaatattacggtgataatttagcgcccaaggctaaggctggccattcctggcgtcaagcattgtggcggcaaccgagtgtagtggtgctgactcggcgcaacaatcccgcaatcacgccattcatcacgctgaatgcaccgccattggcaatttgcccacggcatggtctagactggccgcgttcttgtcggggtgccttgttggaaggctgagatcggtaaataccggatcccgttgaacctgatcaggttagcgcctgcgtagggaacaagatttctcgtcacccggcgagtcctcttgtgcttcgtccgggatgttgttcgacaatcgaacagccctcgtgcgccaagcacagcactggttccagtgcgtccgtccgtcacaggttcgctccgacaaaaatccaccgcctggataagttggagagcccgtgatgactacaacattaaaaaacaccgtgcatttgagtgaatcggccaaggtcgactccggctccgtgcagccgtttacccgctcgcagaagatctacgtggaaggcacccgcccggacattcgtgtaccgatgcgacaaatcagcctggacgtcacccccaccgatttcggcggtgagatcaacgcgccggtcaccgtgtatgacacctccggcccctacaccgaccccaacgtgatcatcgacgtgcgcaaaggcctgggcgatgtgcgctcgccgtggatcgaagtgcgtggcgacaccgagcgcctgccgggcctcagctcgcacttcggccagcagcgcctcagtgatgccgagctgaccgcgttgcgcttcgcccacgtgaagaacccgcgtcgtgccaaggccggcgccaacgtcacgcagatgcactacgcgcgcaaaggcatcatcaccgccgagatggaatacgtcgccatccgcgagaacatgaagctcgaagaagcccgcgccagtggcctgctcgaccagcagcacgccgggcacagctttggcgccagcgtgccgaagatcatcaccccggaattcgtgcgcgaagaaatcgcccgcggccgcgccatcatcccggccaacatcaaccacaccgaactggaaccgatgatcatcggccgtaacttcctggtgaagatcaacggcaacatcggcaacagcgccctgggttcgtccatcgaagaagaagtggccaaactgacctggggcattcgctggggttcggacacggtgatggacctgtccaccggcaagcacatccacgaaacccgtgagtggatcatccgcaactcgccggtgccgattggcaccgtgccgatctaccaagccctggagaaagtcggcggcgccgccgaagacctgacctgggagctgttccgcgacaccctgatcgaacaggccgagcagggcgtcgactacttcaccatccacgccggtgtattgctgcgctatgtgccgctgaccgccaagcgcgttaccggcatcgtgtcccgtggcggctcgatcatggccaagtggtgcctggcgcaccacaaagagaacttcacctacacgcatttcgacgaaatctgcgaaatcatgaaggcctacgacgtcagcttctcccttggcgatggcctgcgcccgggttcgattgccgacgcgaacgacgccgcgcaattcggcgagctggaaaccctcggcgaactgaccaagaccgcctggaagcacgacgtgcaaaccatgatcgaaggccctggccacgtgccgatgcagttgatcaaggagaacatggacaagcagctcgagtgctgcgacgaggcgccgttctacaccctcggcccgctgaccaccgacatcgcgccaggttacgaccacatcacctccggcatcggcgcggcgatgatcggctggttcggttgcgccatgctctgctacgtcacgcccaaggagcacctgggcctgccgaacaaggatgacgtgaagaccgggatcatcacctacaagatcgccgcccacgcggcggacctcgccaaaggccatccgggcgcgcagatccgcgataacgccttgagcaaggcgcgtttcgaattccgctgggaggaccagttcaacctcggcctggaccctgacaccgcgcgttcctatcacgacgaaaccctgccgaaggattcggccaaggtcgcgcacttctgctcgatgtgcgggccgaagttctgctcgatgaagatcacccaggaagtgcgtgagtacgcagccaaccagcgcattgaagcggtggatgtggatgtggccaagggcctggccgagcaggcggagcggttcaagcaggaaggcagccagctctacaagaaggtctgattcaagacgtctgtaccggccttatcgggggcaagccccctcccacatgactcaaactgtgggagggggcttgcccccgatagcgatccagcaaacaacaaatgcccctcagagataacacccttgagcattcaaccgagtacttactcccccgatatcgcagtgccgagcgacaaaagagtcttcggcgcccgcgacctgttctccctgtggttctccctcggcatcggcctgatggtcctgcagaccggcgcgttgctggcgccgggcctgggcttgtccggttcgttgctggcgattttcctcggcaccctggtcggcgtcctgctgctggccgctgtcggcgtgatcggcagcgacaccggcctgtccgccatggccgcgctcaagctgagcctgggtgccaggggcgccagcctgccggcgctgctcaacctgctgcaactgatcggctggggctcgtttgaaatcatcgtgatgcgcgacgccgccagcctgttgggcgcgcgggcgttcagcgacggcagcctgttggccagtccattattgtggacgctgttctttggtggcctggcgaccttgctggcggtcagtggcccgctgacgtttgtgcgccaggtcctgcgcaaatggggcatttggctgctgctcgccgcctgcctgtggctgacctggaacctgttcgcaaaagccgacctcgccgtactctgggccaaggccggtgacggttcgatgccgttcgcggtgggctttgatatcgcgattgccatgccgctgtcatggctgccgctgatcgccgattactcgcgcttcggcaagcgcgcccaaagcgtgttcggcggcacggcgctggggttctttatcggtaatttctggctgatgagcctgggcgtggcctacaccctggcgtttgcgccgagcggcgaggtgaatgcgctgttgctggcgttggccggggctggcctggggattccgctgctgctgatcctgctggatgagtcggaaaacgcctttgccgatattcactcggcggcggtttccagcggcatgctgttgcgcttgaaggtcgagcacctggcgctggccatcggtgtgatctgcacgttcatcgcctgctttgcaccgttggcccaataccagaacttcctgttgctgatcggctcggtattcgcgccgctgttcggcgtggtgctggtggatcacttcatcctgcggcgccgtggtcagggtactgtcgccaacctgcgttggccggcgctgctggcgtggttgggtggcgtcgtgacgtatcacctgttggccaatctgtatccggacatcggcgcgaccctgccggcgctggtgctggcagggctgttgcagttaattctggctaaagccttcagcggcgtgcaggcaccagctcaggctggatgatgccgtccaggcgtgaatagggaatctgcaattcgacgtggcccagggcgtacggcgcgatggttttggtagggtacttgaggatcacgccaccataggtcagcgccacgttcggggttttctggaaggggtaggtcttcacatactccggctccaggctcaggcgggtgctgatcagccagctgttgtgggccacctgggcggctttccagaacgcgtcttccttgccgggcagcagcatgtcggtcagggtcagggccttttgccgctggcgcgaatagttgatgaatgcgcggcccggctcgccgtgggtggcgccctggtccaggtagctggacaattcgatgatcaccaagccgtcatgctgttcacgtaccttggcctgcaaatacatgctgttgcggggggcggcggttttgaggaattgctcgcgataggtctccaggctggtcggcaggggatcgctttgggtcatttccagcaggcgctgttcaatcaatgcgtccagcttggggtccttggcaaagtgcacggtgtcgatattcaccagcgggcaatcggcgctggcgcagcccggcttgctttgctcggtggcgtcgcgggtggcttccagcggagctttgtagcttggctggaacaggctctggcacgcgccgagggtcaatgcgatacaggccacggaggcgatttttaaaagcgacatgtaagtccttcgtctatcgataagagcgaaatttgtgcagcttcgactgccagcacggcagtcagttcgccactaagctgattagagtgtgtttgacgcccgccgtctatcccggcaactggaaaggggctgcatccagaggcatgagcgcgttaggatggcgccaattgcgcaggctcaacgaggaagggacatgacggattcagcaaaatcgacgccgagcacaatcgagattgttcagcgcgacaatgcctaccagggcttctacaagcttgatcgcgtacaactgcgccatgagaagttcgatggcggcatgagccgggtgatcaaccgcgaagtttttgttcgtcatgatgccgtgtgcgtgctgccctacgacccgcagcgcgatgaagtggtgctgatcgagcagttccgcgtcggcgccatggggcgtaccgacaacccgtggctggtggagatggtcgccggcctgatcgacaaggatgaagagccggaggaggttgcacaccgcgaagccgaggaggaagctgggctgacattctccgcgctgtggccgatcaccaagtatttcccgtcgcccggcggcagtaccgaatttgtccacttgtacctgggccgttgcgacagctcgggcgcaggcggcgtccatggattggaagaagaagctgaagatatccgcgtcaccgtgtgggccttcgaagatgccctgcaagcggtacgcgacggcaaaatttccaacgcagccagcattatcgccctgcaatggcttgcgcttaatcgcgcggaagtgagggggttatggcagtaaaggcacgggaacgttatcgagtcgacctgatcgggctgcaagccgcctgcgaggccaactatgcgcggctgatgcgcctgctccccgacatgcgccatgcccccgaggcacggcgcattggcgtgacccacggcgaccagatgctcggcgtgctggccctggaagtgatcgtcaattgcccctacaccaccaccctgcgcgtgcgccaggaacacagcctgccttggctgccggtgccgcagttggaagtccaggtgtaccacgacgcgcgcatggccgaagtgatcagcgccgaacatgcgcggcgctttcgcagcatctatccttaccccaacgtgttcatgcaccagcccgatgagaaagcacagctgaatgtgttcctcggtgaatggttgagccactgcctggccctgggccatgagttcgaagccgtgcggtagatgtgaactgcgtccgcttcctgggtttcctctttgtgtcctgccccagcataatcacgccaaacgtccattcctgcgattgccttgggagagcgccttgtcgagcgtatccaccgtgagccacgatgcaccggccttgctggtgcaactgtccgacagccacctgtttgccgaggccgatggcacgttgttgggcatgaacacccgtgacagcctgcaaagggtgatcgagttggtgcgtgcgcagcagccacgcattgatctggtgttggccaccggggatctttcccaggacggcacactggagtcgtatcagcagtttcgcgatatgacggcgcccatcggcgccccgacgcgctggattcccggcaatcacgacgagccgcaggtcatggcccacgccgcggtgcacagcgatttgctggagccggtggtcgatgtcggccagtggcgcatcaccctgctggactccgccgtacccggttcggtgcccggttacttgcaggacagccaattgcaactgctcgcccaggccctgagcgaggcgccaaaccgtcaccacctggtgtgcttccaccatcatccggtgtccatcggttgcgcctggatggaacccattggcctgcgcaacccggaggccctgtttgccgtgctcgaccgtttcccacaggtaagggcggtactgtgggggcatgtgcaccaggaaatcgaccgcgagcgcaacggcgtgcgcctgctggcgtcgccgtccacctgcatccagttcgcgccgggcagtgaggatttcaaggtcagtgagcaagcgccgggctaccgctggctgcgcctgcatgccgacggacggttggagaccggggtagagcgggtccagggcttcgaatttaccgtggactacggcagcaacggctattaactgtgggagggggcttgcccccgatggtggtggatcagtcacatctacagtgcctgacactccgctatcgggggcaagccccctcccacattggatcttcggtgtattgaaggccgaggtcatcacacacggccccgatccctgtaaactgcggctctttggctgagtcacggagagcccggcatgtccgcttcgatcctgtatatccacggtttcaacagtgcgcccgcgtccaacaaggccactcagttgatcaccgtgatgggcgtcatcggcctggctgatcaactgcgtgtaccggccctgcaccaccatccccgtcaggcgattcctcaactggaagccgcgattgccgaactgggtcggccactgctggtcggcagctcactcggcggctactatgcaacccatcttgccgaacgccatggcctcaaggcattgctggtaaacccggcggtcagtccccatcggatgttcgacggttacctgggcacccagaagaacctctacaccgatgaaacctgggaactcacccacgaccacgtgacggccctggccgagctggaagtaccggcgccccaggacgccgcgcggtatcaggtgtggttgcagaccggggatgaaaccctggactatcgtctcgcccagcagtattaccgagcctgtgccttgcgcatccaggccggcggcgaccatggttaccaggggttcgcccggcaattaccggcaatgttgagctttgccggcattggcgcagatcagtatcaatccttcgactttgctgcactgtaaagtcgcaggtcattttttaatcgaacgactcacgacgagaccccatggccactcccagcgctagctcttataacgccgacgccatcgaagtcctctcgggcctcgacccggtgcgcaaacgccccggcatgtacaccgacaccagtcggccgaaccaccttgcccaggaagtcatcgacaacagtgtcgacgaagccttggccgggcacgccaagtcggtgcatgtcattcttcacgctgaccactccctggaagtgtccgacgatggtcgcggcatgccggtggacatccacccggaagagggcgtgtcgggcgtcgagctgatcctcaccaagctccatgcgggtggcaagttctccaacaagaactaccagttctccggtggtctgcacggtgtgggtatttccgtggtcaacgccttgtccacgctggtgcgggtcaaggtcaagcgtgacggcaacgagtaccagatgaccttcgccgatggctacaaagccaccgacctggaagtgatcggcaccgttggcaagcgcaacaccggcaccagcgtgtacttcgcgccggacccgaaatacttcgattcgccgaaattctccatcagccgcctcaagcatgtgctcaaggccaaggccgtgctgtgccctggcctgctggtgacctttgaagacaaaggcaccggcgagaaggtcgagtggcattacgaagacggcctgcgttcgtacctggaagactccgtcagtgacttcgaacgcctacccaacgagccgttctgcggcagcctggccggtaataaagaagccgtggactgggcgctgctgtggttgcctgagggtggcgacagcgtgcaggaaagctacgtcaacctgatccccacggctcagggcggcacccacgtcaacggtttgcgtcagggcctgctcgatgccatgcgcgaattctgcgaatatcgcagcctgctgccacgcggcgtgaagctggcgccggaagacgtgtgggagcgcattgcgttcgtgctgtcgatgaagatgcaagagccgcaattctccggccagaccaaagagcgcctgtcctcccgtgaagcggcggcgtttgtctccggtgtggtcaaggatgcgttcagcctgtggctcaacgaacaccctgaactcggcctggccctcgccgaattggcgatcaacaacgccggccgtcgcttgaaggccagcaagaaggtcgagcgcaagcgcatcacccagggcccggcacttccaggcaaactggccgattgcgccggacaggacccgatgcgctccgagctgttcctggtggaaggtgactccgccggcggttccgccaagcaagcgcgggacaaggaattccaggcgatcctgccgttgcgcggcaagatcctcaacacctgggaagtcgatggcagcgaagtccttgccagccaggaagtgcacaacatcgccgtggccattggtgtagacccgggcgcagcggacatgagccagttgcgctacggcaagatctgcatcctcgccgacgccgactccgatggtttgcacattgccacgctgctctgcgcgttgttcgtgcagcacttccgcccgctggtggatgctggccacgtctacgtcgccatgccgccgctgtaccggatcgacctgggcaaggagattttctacgccctggacgaagccgagcgcgatggcattctcgaccgcctggtagccgagaaaaaacgcggcaaaccgcaggtcacgcgattcaaaggcctgggtgaaatgaacccgccgcaactgcgcgagaccaccatggacccgaacacccggcgcctggtgcaactgaccttggatgacttcgccgccacctcggaaatgatggacatgctgctggcgaagaaacgcgcgccggatcgcaagtcctggctggaatccaaaggcaacctggccgaggttctgggctgatgcgcacaggtttcgccctggcgatcctgatgttgagcagtttggcggccacccagttggctgccgcgcctgcggccgagctcaagctggtgtccgaacacccggtggatggcatgcgtggcggcaacctgtcgggcctggcgttgtgcggcaacgagttgtggacggtttccgaccgtgatgacgaccagatctaccgcctggacatcagcgcaccgacctggaaggctgaaacggtaaagatcgacgtgccaccggtgcccgagtccggcttgccgtgggggttgcgttcacgtaccaaggccgcgtctttcattcgcggtggcgacctggattttgaagggatcacctgcgatgccgccggtaaccgctacattgtcagcgaagcccatgcggcggtgctgcaagtgccggtgacgggcgcgcctgagtggttgaagatcgcacccagcatggtgcgtgaagcgcgggccagcggtatgttgctgcacttcaatgcattgtttgaaggcctggcgatcaaccccgaaggcaaccagatctggctggcggctgagcgtgaacggcgtggcctgatttccatcaagcgtccgcaaagcctgtgggactgtgacggcccctgcgtcttgctgagcgaagccggccaggaagtgcaaccagcccagttcccgaacgccaaggcggtgtccaaggattttgccgatctggcgctgttcaacggcaagctgtttaccctggaacgcaatgcgttccagatttgccggcgtgacgcgattacggccaaggttgagctgtgctggtcgtttgccgacgagaccctgacgcctgagcggcgttacccccagccttatggcctggcggaagctctggtggtggatgccgacggtgcctggctgggcatcgacaacaatttcggcccgcgtgccgatggtgaaaaacgccccatggtctatcgttttgccgcccctgccggtggctggagcgccaagccatgagccgatatttttttgaattgacccggcgccgtggcatttccgctgcgccatacccaagcatgatgaggcccgcatgagtgacatcctcgcagacagcttagacggcgtagaacgccggtcgctggctgacttcaccgaaaatgcctacctcaactactccatgtacgtgatcatggaccgtgccttgccgcatatcggcgacggcctgaagcccgtacaacggcgcatcatctatgccatgagtgagttgggcctggacgccgattccaagcacaagaaatcggcgcgtaccgtcggtgacgtactcggtaagttccacccccacggcgactcggcgtgctacgaagccatggtgctgatggcccaaccgttcagctatcgctacacactggtggacggccagggtaactggggtgcgccagatgatcccaagtccttcgcagccatgcgatacaccgaagcgcgcctctcgcgttactctgaagtcttgctgagcgaactggggcagggcaccgccgactgggggccgaatttcgacggaaccctcgacgaaccgctggtgttgccggcacgtttgccgaatatcctgctcaatggcaccaccggtattgcggtgggcatggccactgacgtaccgccgcacaacctgcgtgaggtcgccacggcctgcgtacgtttgctggatgagcccaaagccacggtggagcagctctgcgagcatatccagggcccggactatccgaccgaagcggaaatcatcacaccgcgcgccgacctgctgaaaatgtacgaaaccggcaagggctcggtacgcatgcgcgccgtgtaccacatcgaggatggcgacattatcgtcactgcgctgccgcaccaggtgtccggcgccaaggtgctggagcagatcgccgcgctgatgcaggccaaaccgtcgaaactgccgcaggttgccgacctgcgtgacgaatccgaccacgaaaacccctgccgcatcgtgatcatcccgaccaacagccgggtcgaccacgaagtgttgatgcagcatctgtttgccagcacggacctggagtccagctatcgggtcaacgtcaacatcatcggcctggacggcaagccgcagttgaagaacctgcgcaacctgctggtggagtggctggagttccgggtgcagaccgtgcgtcgccgcctgcaattccgcctcgataaggtcgagcgccgcctgcacctgttggacggcttgctgatcgcctacctcaatctggatgaagtgatccacatcatccgtaccgccgagcacccgaaagccgagctgatcgcgcggtttgagctgagcgagatccaggcggactacatcctcgacacccgcttgcgtcaattggcgcgactggaagaaatgaaactgcgcgacgaacaggacgcgctgctcaaggaacaagccaagctgcaagctctgctgggcagcgaagccaagctgaaaaagctggtgcgcagcgagctgatcaaagacgccgaaacctacggcgacgaccgtcgttcgccaattgtgcagcgtgccgaggcgaaagccctgacagaaaccgagctgctgccaaacgagaaaattacggtcgttctgtcggaaaagggttgggttcgatccgccaaggggcatgatattgacgccaccggtttgtcgtacaaggccggcgacgggttcaagaccgctgcggccgggcgttccaaccagtttgcggtgtttatcgactccaccgggcgcagttattcggtgccggctcacaccttgccatccgcacgggggcagggcgagccgttgaccgggcgcctgacgccgccacctggggcgaatttcgaatgtgtgctgctgccggacgatgatgcgctatacgtgatcgcgtccgacgcgggttatgggttcgtggtcaagggtgaagacctgcaggccaagaacaaggcgggcaaggctttgctgagcttgcccaacaacgccaaggtgatcctgccgcggccggtggatgatcgtgaaagcaactggctggcgtcggtgaccaccgaagggcgcctgctggtgttcaagatcagcgacctgccgcagctgggcaaaggtaaaggcaacaagatcatcggtattcccggcgagcgggtggccagtcgcgaagagtacgtgaccgacatcgcggtgatcccggaaggcgcgaccctggtgcttcaagccggcaagcgcaccttgtcgctgcgtcctgatgacctggagcattacaagggtgaacgtggtcggcgtggcaacaaactgcctcgaggcttccagcgagtggatgccctgctggtagaagcgccggtttaacgcgttttagagctctcgatctacgatttaacgcgtagatcgacgctttggcgctggagtcatggcgcatattcacggatgatatggcctttccagcgccggcgtggccgagcgtgtttaggttatttttagtattacattgtggtttgccttgtggcagccacctggatgggatgatgactgctccacgccttccttttattttcatgctcgctggccttttggggttggcgggttgcagcacccatcaaccggtgtcgctgtaccagctggacagcggaagtccggctcaacctgcacagaccgccggcatggccgttttgctcggcccggtggtcgtagccgactacctgcaacgcgaaaccctcctgcaacgtcagaacgatggaagcctgcaaggttccaccgatggtcgttgggcggggagtttgtcctctgatatcaaccagttgatgttgcgccaggtggcgggtcagttggacagccagcgtgtggtcctcgcgcctgcacccaccggttttaccccggatgtgcaggtgttgctgaccattacccggctcgactccggtgcgtcgcaaccggcaatcctcgacgcacaatggcgtttgatcgaccgtcgtggccaggtgcgcgataaccgcatcgtgcatttgcaggaacagcacaccggctccactgcgtcccaggtccaggcccagggcgtgctgttgcagcatttggcgcagcagttgtcggtggcgctcaagccattggccaaccagccgccgattgccgaagcgccgcgcaagcagagcgccccggcgcaggccaagccggccgctccggaaaagccgaagatgccaatggcgacgccgatccgtacggatatggaagtgttcaggttctgatctgaatcgcgcacaaacaaaaggcccgctgagtaagcgggcctttttgtttgtgcgcaatttgagccaggctgcggacccaatgtgggagggggcttgcccccgatagcggtagttcagttaatgatgtgttaactgatactcggctatcgggggcaagccccctcccacatgagtcctaccgttttatttggtgcgggtctcatgcatccgcgccaactgccgctccagcatcgacggatagggctccatcaaccgctccacacaactggcaccctcagggctggcaatcgggcggatacgtgcgcgttggcggatcagcgtgtcttcactgatcttgcgctccaccagcagcaggttgcggctgtgttgggacaaggccagggcatcctgggcgatctcggtgagcaacaggtcgatctggcttatgccgaacagatcgtcgcccactgtcaggccaagctgcagttgcagggtaatgccgctgtctgccacttcgatctgcagttcatgacccagggcgcgcagcagttcgccgcagcaaatggcgttggtcaggtagtcttcaccactgtcttcgctgtggaacagcatcagcgtgctgccatcgttcagagtgtgcagttcgctctggtacaacgaggcggcctggtcgaggcagtcacggtagcgttccagcaattcggtcaggcgtgcgcgtggcaggcgacgcagttgatcctgcgcacccagttgcaccgccagaacggcgctgtactgcggttccgcactctttaccggagccggtttggcggcgacggccggcgcgctggccgaggtgtcgcgcaggtcggcgaacgggtcttcgtcgtccagctcgtcttcttcagctttgaacgcctggcgggtggcaggttttaggcccgctaccggcgcgtctcccacttcaaactcaggctcatcgtcgaactcaggttctggctcaatctcgcgcaccaccggttccggggcgaagctggcgtgaagttggcgagcgaggtcgcctatttcgtcctggcgatcagtggccggggtatgttcgtcgatgtcccgcagccagatgcgcagttgcatcaagggcgtagagatatgccgtcccaggcgcaggctcagggccagggccaatgccagcaggatcgcgctgagaatgcccatgctttgcaggctgatggtcatcggctgctggaattgctgcatgtcgaggctgatgcgcagttggccggccttcacatcctgaaaggtgatattgctcgaatacaggccttcggcctcacccagcaggccgtttttcgggcgttgcccggcttcggccatgatccggttgtccacgctgtagatggcggcgtgggccaccagcgggttcttggtcaggttgttgagcagcacgttgaggctgaggatgtcgttggacaccagcaactcagtcgccgaggtggcggtctgtgtggtcaggctctcgcccagggcgtcggcttgttcgtgcatggcctgtttgaactgcaatcccatcacgcaggcatagatcaccagggccagggcgaccaggatcacgttatggctggcgatgcgtaatgcgatcggtacacggcggtggcgcagtgcccggaagatcagcaggaagaagttatcggtttttactggcgtgggccggttcacttgcgctcggctcttggtccgtgaagttgacgcgcagtatagcgacagccccatgaccggcaaagcgctggctgtgcccgatggtcactgaaagtgggtagaatgcggtttttttccagcctgggggtgcgccttgcgcgaaattgtcctgattaacatcactggggaagaccgcccgggtctgaccgcagccattaccggcgttctggcccagggtggtgtgaacattctcgacatcggccaggcggtgatccacgacaccttgtcgttcggcatcctggtcgaaatcccgagcaccgagcaggcgtcttcggtgctcaaggacatcctgtttacggcgtacaagctggaccaacaggtgcgtttcaccccggtgtccgaagccgattaccagcaatgggtggccggccagggcaaaaaacgccacatcgtcacgctgctgacccgcaaggtcaccgccgagcaactgcagcgtgtcagctccattaccgcgcaatatggcctgaatatcgaccatatcgaccgtttgtcgggtcgtatgccattggacacgccggccgacaagggcaagggctgcatcgagttctccgtgcgcggcgaaccggccgacccgcaggccctgcgtgccgagttcctcagcgtggcccaggagctgaacgtcgatatcgccttccaggaagactcactgttccgccgcaaccgccgcctggcagtgttcgacatggactcgacgctgatcgaggctgaggtcatcgacgagctggccaaggctgcgggtgttggcgagcaggtctcggaaatcaccgagcgcgccatggccggtgaactcgacttccgcgccagcttcaaggagcgcctggcgctgctcaagggcctggacgtgagcgtgctggacgccatcggcgcttccctgcgcctgaccgaaggtgcagagaccctgttcgccgagctcaagcgcctcggttacaagaccgccatcctgtcgggcggcttcacctatttcgccaagcaattgcaggctaaattaggcatcgactatgtgttcgccaatgagctggaagtggtggatggcaaggtgaccggtgtggcggtggagccgattgtcgacgcccagcgcaaagccgatctgctgaaggaattggcccacaaggaagggttgcgtctggagcagactattgcggtcggcgacggtgcgaatgacttgccgatgttggcaatcgcggggttgggcgtggcgttccgggccaaaccgttggtgaagcagtcggccaagcaggcgatttcgacattggggctggacggggtgttgtacctgttgggtttccgcgaccgcgatgggcagctgtaactgaagaaacgcagttcaaaaatgtgggagggggcttgcccccgattgcggtggatcagtcaacaaatctctgactggactgccgctatcgggggcaagccccctcccacatttgaccttcactgaattcaaatcaggctttcggcagtgcgatgccttggcccatctgcaccggcgtacccgccgccagttcttctgcccacttcacctgatccggcccgaacagcacaatcgccgtcgagcccagcttgaagcgacccaactcggcacctttttccaggtggatcggcgcacgtgcagcttcgtcgtagcggaaggttttcagctcacgcttcggcggtgtcaccagcccggcccacacggtttcaatcgacgccacaatcatcgcgcccaccaataccacggccatcgggccgcgttcggtgtcgaagatgcaggcagcgcgctcgttacgtgcaaacaactcgggtacgttttcagcggtggtctggttgaccgaaaagatgcgtccaggaatgtagaccatctcgcgcagcgtaccggccagcggcatgtgcacgcggtggtagtccttcggcgagaggtagatggtggcgaaatcaccgcccatgaacggcgccgctacggctgcatcgccacccagcagttccagcacgctgaagctgtggcctttggcctggaacacgcggccatgttcgatcggacccaactggctgaccgcaccatcggctgggctcagcaccgcgcctgcggtttgatccagcgggcgggcgccgtctttcagggcacgggtgaagaaggcgttgaagtgctcgtaagcggtgacgtcttctaccagggcctgggacatgtccacttgatagcgcttggcaaaccagctggtgaaggcgttcttgaaccaacgcacgcggcactcggcaatgcagccagccaggcgcgacagcaagtggtgcggcagcaagtactggctgaggataaacaactgctttttcataactgtccttaaaccttaaatctcgacgggggtgtcggggtggttgccccattcgccccaggaaccggcataacctttgactcgcggataaccgagcgccttggccaccaggtaggtgaagccagagcggtggtgagtctggcagtgggtgatgatttctttgtcgcgggtcagcccgaggtcttcgaggatctgtggcatgtcacggcggatgcgcaggttgcgcgccttgtccatgccggccgtccattcgaagttcaccgcgccgggaatgtgtccgcctttggcggcgaggaccttctcgccggagtactccagcgggccacgtgcatcccagatgcccaggtcggcagcacccaggcggctttgcaggtattcacgggtagcggtggggccatcatgcagcgtgagactgaccgggccaccgacaggtgcgggcacgtcggtggagaccgggcgttgttcttccagccaggccagcaggccgccatccaggtagtggtatttctggtggccgatcacgtcgagcatccagataaagcgcccggcccagccgccgccttcgtcgtcgtagaccacgtaggtcgcatccggggtatggcccagttcgccgaacagtttttccaggtcggccttggtgggcagcaggccgggtgccggcggctggcccagttgggtgcgtttggggtcaacgaaatgcgcgccggggatatgcccttcggcgtagcgggcggcgctggtgaggtccaccagaatcaggtgctcggcaccgaggcggccttgcaggtcgctggactcgatcaccagcggcaagccagagaagtcaggcatgtgaggtctcctgggcacaaatgttggcgataaaagacggcgattgtagcgcaagcatcaggcgctgcggttggtaaagcagtgcagggctttttcgatgcattgggcggttttgccgaaggcctgcacggtggtttccgagaacggcccgccaccctggtcggccaccatcagcatcaccaccttgccattgcaactcagggagcgcagcagcagatgttcgccggtgaacaggcggcgcaggatcggcggcagcaaggctgagaactgggcatggttctcggggttgagacgcacctgggcggacttttccagcagacgttgcagcagggtgctgttgaccacgtccaggctcaggttggcggcgtccttgggcaggccatcgacctggtgcacgcgcaaggtactcaaggcgcgatcggccatcagcagcatgacccgctgcatgccactggcgaccaaggcctctttggcgcacgtggtcaggtgcatcgcgttggcaaagcggctcggttccaccaagagttcagtgcagcgcttgcgccacacggccagggcctcggcggtgggcggtggcgccggcagcaggccgcgatgaatcttcgccacatgccacggccagatcagcgacagcgccgggtgccagaggtcgggcatcagggtggtacgggcactggtgacggcttgctggtggaccagttgctgcacctcgcccaacggttgttgcaggtacagcgctgtgagcaactgccagcgttcggtgtgcgggcaggtccaggattcctgggccgacatcgccaggccgttggccagcaacacggtattggccggctggttcagccagcgccgcaggttgggttcggcgtcgagcaattgctgatggcgcagtgggtcgtcctcacgggcgatatgcagggccttgaccagcaggcgctgctcgctcatcagcaacttatagccctgggacacccagatcggcaggtgccaggcttcggtcaggccgacgcacaggtcgagcaggcgtatgccgaacagttcctgctcgaccgcgcgggctgactggcccttgtggataacccgcagctcccactcctccagaagcttggggtaggccaccgccatcggccacagtggcgacaggaacaacaggctgccccagtggatgtcctgccacagccgcgccaggcgactgccgaacaaaccgttggcctgctgcgacgcgtgctggctgaccagcaacagttggcgcaatgccacggggatctcgtgtgcgggcaccgagggcaggcgcgccagcaattcttcggcgcgcttgaggcccaggcgattgagcgccacctcgaggttttccgccggttccgccaggctgccatgggtgtggctgttggcctcgcgcatcacgctgagcaccagggccgggctgttttgcatcagctcggcaatatcccgcaacgaactgcggttatcacggatgcctttgcacacgcggtcgtggctggcctggggaacgggcagcagcacatcgtccaggcgcttgatccaagcggcgagagagttgggttttgcagttgggactgtcgtttcattagccatgattggggcgcgatcatcacttgcggtctacacgcccggagcgggccgaactggcttttcgccttaacgggctatagtctggcgcagttttgccgataagtagaacaagagttttctgctacacccaatatgtccatgaacccgacggcgcaagtactcatctcctatggctaaaattatcggcatcatcgtcgtcttcgcaagcgtgctcggcgggtacgtcctgtcccacggtaaaatcgctgcgctgatccagcctttcgaggtgatgatcatcggcggtgcggcactgggtgcattcctgcaggcgaaccccggctacatgaccatgcacgtgatcaagaagtcgctgggcatgttcggttcgcgcttcacccataccttctacctggaggtgttgggcctggtctacgagatcctcaacaagagccgccgcgaaggcatgatggccatcgaggccgacatcgaagacgccgccgccagcccgattttcgccaagtacccggccgtgctcaaagatgagcgcatgaccgcctacatctgtgactacctgcgcatcatgtcctccggcaacatggccccccacgagctggaaggcctgttcgacatggagttgttcagcctcaaggaagagctggagcacccctcccacgcggtgaccggcatcgctgatggtatgccgggtttcggtatcgtcgcggcggtactcggtatcgtggtgaccatggcatccctgggtgagggcgaccaggccgctatcggcatgcacgtgggtgcggcgctggtcggtaccttcttcggtattctcgcggcctatggcttcttcggcccgctggcgacttccctggcccatgacgccaaggaagaagtgaacctgtacgaatcgatcaaggccagcctggttgcttccgcttccggcatgccgccgtcgctggcggtggagttcggccgcaaagtgctgtaccccaagcatcgcccaagcttcgccgagctggaacaagcggttcgcggtcgctaagccatggaaaacaaccagccgataattatcaagcgcgtcaagcgcttcgctgcggggcaccatggtggcgcctggaaaatcgccttcgccgactttgcgacggcgatgatggcgttcttcctggtgctgtggctgatgtccaccgccacgccggaacagaagatcgccattgccggctacttcaaggacccgattggtttctcggaaagcggcacgcccttcgtgatcgacctgggcggctcgccgcagttggcgcctgagcgcaccatcaacccggaggtcaagaccgaagcgcctcaggaaaaaatcccgatcgagcgcgatactgtcgagtctatggccgaacaggtcgagcaggagcgtcttgaactgttgctgcaagaactgcagaccaaggttgaggaaaacccgcaactgttgaagttcaaggatcagatttcattcgagatcaccccggacggcttgcgcatccagatcaccgacgcagccaaccgcccgatgttcgactccggcagtgcgcgcttgaagccgtactttgaagacatcctgctggccatggccgacaccatcaaggcggtgccgaacaagatcagcatcagtggccacaccgacgccaagccttacgcaggccagggtgacttcggtaactgggagctttcggccaaccgcgccaacgctgcacgtcgtgcgctggtggccggcagctacccggacccgcaagtggcgcgcgtggtagggtttgcatcgtcgcagctgtttgaccccaaggacccgttcaaccccatcaaccgccgtatcgatatcgtggtgctgaccaaaaaggcccaacgtgcgatcgaaggtgaccagcccccagcggcgcaacctactccgggggccggcgcgccgggtgaagtaccggccgatccgaacgcgattccgccaggacaggagccgttgccggcgcatgagctgcgtcagaagctgaacctgtttgatgacggtggggtgaaggatcctacggtgcctaagacgggttcttaagcaactaaggtctttttgtggtgagcgggcttgtcccgcgttgggctgcgaagcggccctgatccaaacgccgcatttcttccaggtaaaccgcgtcatcaggcttcggggctgctgcgcagcccaacgcgggacaagcccgctcgccacaatgttgtctgtgcggctcaataactgctttcgggcaagctcgcaataatcgaccgatagctgttcatccgctgttgctgcacgcgcccatcttccagggccttgagcaacgcacagcccggttcgcggtcgtgtttgcagtcgcggaagcggcaggtgccgatcaggtcgttgaattcgataaagcccgcttcgacatcgcagcggctgacgtggccgaggccgaattcgcggatgccgggggagtcgatcaactcgccgccgccggggaagtggaacaaccgtgcggtggtggtggtgtgggtgccctggccggacagttccgacagtgggcctacgcgggtgtcgacttccggcagcaggctgttgaccagcgaagatttacctacgccggactggcccacgaacacgctgatgcgtccgtccaactgctgttgcagctgttccatgccattaccgtgatgcgccgaaacctccagcacggggtagccgagggtgcggtacaccgccagtaacgcgttgagcgccggggcattctgctcgtcgatcaggtcgaatttgttcagcagcaacagcgggcggatgccggcatgctcggccgccaccaggtagcggtcgatcaggttggcatggggctcgggcagtggcgcaaacacgatcacgatcatgtcgacgttggcggctaccggcttgagctggccccggctatccgggcggcgcagttcggtggtgcgcggcagttgggcgacgatcacgccgatgccctggttgccggcacgccacacaaccttgtcgcctgtgaccagcgccggcaggttggcgcgcaagtggcagcggaacacctggcctgcgagttcgccttcgagcgcctcgacttcgacctgcacgccgaagtgcgcgatcaccaggcctgtttgttcagggccgaggtcgccgccctcgagcgcttccacggcggaggattcacgtttggcggcgcgcgcggcgcgttcaccctgaatcttttcgatgcgccagttttggcgacggttgagctggcgtttggccattggtgttccgtgtcgataatgcaaaggttgggtaaaacggtcgcgagtctagcacggccccgcctgctaaactgcgcagctacgccaaggtgccaagagaatcaaaccatgcaaaacccacagaacctgatttggatcgatctggaaatgaccggcctgaaccctgacaccgacgtcatcatcgagatggccaccattgtcaccgacagcaacctcaacaccttggccgaaggtccggtgatcgccatccaccacagcgacgccgtgctcggcaccatggacgagtggaacacccgcacccacggcaactccggcctgacccagcgcgtgcgtgacagccgcgtcagcatggccgaagccgaagccgaaaccatcgccttcctggaaaagtgggtgcccaagggcaagtcgccgatctgcggcaacagcatctgccaggatcgccgcttcctctatacgcatatgaaagcgctggaaagctacttccattaccgtaatctcgacgtatccaccttgaaagaactggctgcccgctgggcgccggaagtgaaggacagcttccataaaggcagcacgcacctggcgctggatgatatccgcgagtcgattgccgagctgcagcattaccgcaagcatttcatcaaggcctgaactccctcaatggtgagccggctcgccacagttttgcaaggatcgccctcatgctgctgatgctctacctcatcgccatcactgccgaagccatgaccggcgcgctgtccgccgggcggcgaggtatggactggtttggtgtggtgctgatcgcctgcgtgacggcgctgggtggcgggtcggtgcgcgatgtgctgctggggcattacccgctgacctgggtcaagcacccggaatacctggtgctgacctccgtcgccgcgctggtgacgatctttatcgcgccgctgatgcgccgcctgcgttcgttgttcctggcattggacgccctgggcctggtggccttcaccctgatcggcagcatgactgccctggaaatgggccatggcatgctggtggcgtcggtcagcggcgtaatcaccggcgttttcggtggcatcctgcgggatatcttctgcaacgacatcccgctgatcttccgccgtgagctgtacgccagcgtgtcgttcctggccgcctggttctacatgctgtgcctttatcttgagctgcccagtgagcaatcgatcctgctgacgctgttcagcggctttctactgcgcttgctggcgatccgtttccactgggaaatgcccaagttcgtctacaacgacgacgtgcactagcgcgtcgcgtgctggttcagcgcccattccacatgttcgcgcaccaggtccgagggatattcccgccgcgccttcaaggcttccagcaccggaatgcttgatggtgcgttgcccaggcccaccgccaggttgcgcaaccagcgctcatagccggcgcggcgcaggggtgaaccttcggtgctgctgaggaatttatcctcgtcccacataaacaactcggccagttcggcgttatccaggttgtggcgtggcttgaaatcgctttcggtggtggcgcgggcgaaacgattccatgggcaaacgatctgacagtcatcgcaaccgaacacgcggttgccgatcaacgggcgcaggtcttcggggatcgcgttcttgagctcgatggtcaggtaggaaatgcagcgccgggcatccagcacgtaggggcctacaaaggcattggtggggcagatgtccaggcacgcggtgcagcgcccgcaatgttcggtgctgtggggggcatcgactggcagcggcaggtcgacaaacaactcgctcaggaagaagtagctgcccgccttgcgattgagcaccagggtgttcttgccgatccagcccagcccggctttttcggcgatggctttttccagcaccggtgcgctgtcgacgaaggcgcggaagccgaacgggccgatctgcgcctggatgcggtcggccagttgctgcacgcgcttgcggatcagcttgtggtaatcgcggcccagggcgtaacgcgagatataggctttttccggtttggccagcagttgcgccatttgtgtgtcgccgggcaggtaatccatgcgcagcgagactacgcgcaaggtgccgggcaccaactcctccggatgggagcgtttgctgccatgggcgcccatgtaatccatctcgccctggtaacccgcgtcgagccagcgttgcaggtgctgttcatgctcggccaggtccaggccgctgatgccgacttgctgaaagcccagctcgcggccccagtctttgatcgattgggcgagggcaggcagatcggtggtgatggcaggcatgagacaagggaaaccgcaggttagataggtataattctgccagacatcggagcttgaagacgcatgccgcagacaaaacacgcaataaccgacgtacaaccgctgttgcacggccatttgccgcaactcgctgcgcgttccccggacgcccataaaggccagttcggccacctgttggtcatcggcggtgaccgtggctttggcggcgccgcgctgctgagtgccgaaagcgccctgcgcagcggcgcgggcatggtgtccctggcgacgcgcctggaacatgtgcccgcggccctggcgcgcctgccggaagtcatgaccgttggggtgagctcggccaatcaattgatgggcctgctggaaaagatctcagtcatcgtgatcggacctggactcggtggtgcgtcctggggcaaaagcctgctttccgtcgccgccaacgccagcctgccgcaggtgtgggacgccgacgcgttgaatcagctcgccatcggcagtgtcactctgccggctgattgcgtgatcaccccgcatccgggggaggcggcgcgcttgttgggcgtgtcgacagccgaggttcaggccgatcgtcttaaggtggcgcgcgcgttgagccagaaattcaacgcagtggctattctcaagggcgcaggcagtttgattgccagcccggacgggcgcgtttcacgctgtgaccaaggccacccggcgatggccacggcagggctgggcgacgtgttggccggcctggtgggtgcactgctggcccaaggcatgcccgcctatgaggcaagctgcctggctgtgtggctgcacgcgacggcgggagatcgccaggggacgttcggtcgcgggttggccgccagtgatctgatccctgccattcgtcaattgctggaggagcagtcaccgtgtctgaagtaattcttttcctggccgatgaagaggccatggttgccttcggccagcgcatcgcccaggtcacggcgggagcggggctgatctttctcgaaggcgacctgggggcgggcaagaccacgctgtcgcgggggatcattcgcgggctgggccacacaggggcggtaaaaagcccgacgttcaccctggtagagccctacgaagtcggcgacgtgcgagcgttccatttcgacctctatcgcctggtcgatcccgaagaactggaatacatggggatccgggattacttcgacgaagatgcgctgtgcctgatcgagtggccagataaaggcacaggctttttgccaaagcctgacctgaccattaccattacgccgcatgagcatggacgtcagttgaagttgttgccccagagcgtgcgcggccagtcgtggtgcgcggctttggcattggaattcaaataattggtggggttaggtatgcgctttcgcgcgttggttgctgtcgtgggggtgttgcttgcggcaatgactgtcaatgctctggctgcttcacaggtgaagagtgttcgcctgtggcgagcgccggataatacgcgcctggtgttcgacctgtctggcccggtccagcacagcgtctttaccctgacgtcgcctgatcgcctggtgatcgatatcaacggcgcgaccctggccgcgccgttgaaagtctccaccaccaataccccgattaccgccatgcgctcggcccaacgcacgccgaccgatttgcgcgtggtcatcgacctgaaaaaggtcgtgaccccgaaaagcttctccctggcgcccaacgcccagtatggcaaccggctggtggtcgacctgttcgacaacgccgccgatgccgcgccgccgcctgcgcccaccccgagcgtggcaacggtgccggcggtgccggtcaacccgtcgcaaccgcaggtcaagctgccaccgccgccaccggccccggccggcaaacgcgacattattgttgtgatcgatgccggtcacggcggcgaagacccgggggcttccggctcgcgcggccagcatgaaaaagacgtggtacttgccatcgcccgcgagctgcagcgccaggtcaatggcatgaaaggctaccgtgccgagctgacccgtaccggcgactacttcattccgctgcgcggccgtaccgaaatcgcccgcaagaaaggcgccgacctgtttgtgtcgatccacgccgacgccgcgccttcggccgctgcctttggcgcttcggtgtttgccctgtcggatcgcggcgctacgtccgagaccgcgcgctggctggccgacagcgaaaaccgttccgacctgatcggcggcgccggcaacgtgtccctcgatgacaaggacaaaatgctcgccggcgtgctgctcgacctgtcgatgaccgcttcgctgacctccagcctgaacgtgggccagaaggtgctgagcaacatcggccgggtcacctcgctgcacaagcagcgtgtggaacaggccgggttcatggtgctgaaatcgccggatatcccctcgatcctggtggaaaccgggtttatctccaactccaacgaggcctcgaaactggccagcgccagtcaccagcaggcgctggcgcgttcgatcagcgccggtatccgccagttcttccagcagaacccgccgccgggcacctatatcgcctggctgcgtgactcggggaaaattgcccagggcccgcgtgaccatcgtgtgcagccgggcgacaccctggccatgctggcggtgcggttccaggtgtcggccgcgaccttgcgcagcgccaacaacctgaaaaccgatgaattgaaagtcggccaggtgttgaccatccccggcactgaattggcggcacaataatgagtgaatcactcctcgacagcggatcgcgcattgagctgctgagcccgcgccttgccaaccagattgccgccggcgaggtggtcgagcgcccggcgtcggtgatcaaggagctgctggaaaacagcatcgactccggcgccaagcgcattgatgtcgatgtggagcagggcggcgtcaagttgttgcgcgtgcgtgacgatggcagcggcatttccgccgatgacctgccgctggctctggcgcgccacgccaccagcaagattcgcgacctggaagaccttgagcgggtcatgagcctgggctttcgcggtgaggcgctggcttccatcagctccgtcgcccgcctgaccctgacctcccgcacccgcggcgccgaacaagcctggcaggtggaaaccgaaggccgcgacatggcacctcgggtgcagccagcggcgcatccggtcggcacttcggtggaggtgcgcgatctgttcttcaacaccccggcgcgacgcaaattcctcaaggctgaaaaaaccgaattcgatcacctgcaggaagtcatcaagcgcctggccctggcccgcttcgatgtagcgttccacctgcgccacaacggcaagaccatcctcagcctgcatgaagccaacgatgacgccgcgcgtgcgcgccgggtgtcggcgatttgtggggcgggcttcctggagcaggcgctgccgattgaaatcgagcgcaatggcttgcggttgtggggctgggtcgggttgccgacgttctcccgtagccaggcagacttgcagtacttctttgtgaacggccgcgcggtacgcgacaagctggtggcccacgcagtgcgccaggcgtatcgcgacgtgctgttcaacgggcgtcacccgacgttcgtgctgttctttgaggtcgacccctcggtggtggacgtcaacgtgcaccccaccaagcacgaagtgcgcttccgtgatggacgcatggtgcatgacttcctctatggcaccttgcaccgcaccctgggtgatgtgcgcccggatgatcaattgtccgcaccgattgtgacggcagtggtccgcccgagtggcccggaggccggtgaattcggccctcagggcgaaatgagcctggcggcgaacctgctgcaatcgccgcagtcgcagccgtcgtacaccgcgccgaatgccggctccggctcgggttatcagtaccaatacaccccgcgcccgcaatcggcggtgccggtggccgaagcccaggctgcgtatcgcgagttttttgcaccgctgccgggggctgagccgggggcgccggtcgccttaccggagggcggtggtgatattccaccgctgggttatgcgttggcgcagctcaagggcatctatatcctggcggagaacgcccacggcctggtgctggtggacatgcacgccgcccacgagcggatcatgtacgagcgcctcaagatcgcgatggccagcgaaggcctcagcgggcagccgctgctggtaccggaatccctggcagtcagccagcgtgaggccgattgcgccgaagagcatcacagcgtgttccagaagctgggctttgaattgcaacgcctgggcccggaaaccctggccatccgccagattcccgcgctgctcaagcaggctgaggccaaccggctggtggcagacgtgctggcagacctgatggagtacggcaccagtgaccgcatccaggcgcacatcaacgagctgctcggcaccatggcctgtcacggcgccatccgtgccaaccgccgcctggccctgccggaaatgaacggcttgctgcgcgatatggaaaacaccgagcgcagcgggcaatgcaaccatggccgaccgacctggacccagatgggcctggacgatctggacaaactgttcctgcgcggccgttgatgagtgccttgccccccgcgatcttcctgatgggccccacggccgccggcaagaccgacctggccatcgaactgaccaaggtgctgccgtgcgagctgatcagtgtcgactctgccctggttttccgggacatggacatcggcaccgccaagccttcgaaagagctgctggcccagcatccacaccggctgatcgacatcatcgacccgtccgagagctattcggctgcagattttcgcaccgatgcactcgccgccatggccgacatcaccgcgcggggcaatattccgctgctggtgggcggtacgatgctctactacaaggcgttgcaggaaggcctggcggacatgccgccggccgacgcccaggtgcgcgccgagcttgaagaagaggctgcacgccttggctggcaagccctgcacgaccagttggcggcggtcgacccggtctccgccgcacgcattcaccccaacgacccccagcgcctcacccgtgccctggaagtctggcgtgtgagtgggcagaccatgactgaacaccgcctgaaacaaagtgcgcaaagtgctgacgcaggcgcttcgggacagtcacaattgccctatactgtggcgaatctggccatcgctccggcaaatcgccaggtgctgcatgaacgaattgcacaaagattcacaattatgttggaacaggggtttgtggacgaggtcgtagctctgcgttccagaggtgacctgcatccagggttaccttcgatacgtgccgtaggctatcgccaagtctgggatcatctggatggcaagctgacgtcagccgaaatgcaggaacgcggcatcattgccacgcgccaattggcgaaacgccagttcacctggttgcgcagctggagcgatttgcactggctggacagcctggacagcgacaatctgtcacgcgccttgaaatacttgggaacggtctccatattgagctgagtccttgcaattgccgtctatccttgggggtgtgacggccataagctatctattttccgattttttattattgatccttaaaggagtgcggcacatgtcaaaagggcattcgctacaagacccttacttgaatactttacgtaaagagaaagtgggggtttccatctacctggtcaacggtatcaagctgcaaggcacgatcgagtcgttcgaccagttcgtgatcctgctgaaaaacaccgtcagccagatggtctacaagcacgctatctcgacagtcgttccagttcgtccaatccgtctgcctagcgcaacgggtgatgaacagggtgacgttgaggcaggtaacgcctgataggagtctcctttgttctttgagcgccacggtggtggtgagcgagtgatcctcgttcacttggatggacaggaccctgaggcgcgcgaagatccgcaggagtttcaggagttggcaaattcggccggcgccgagaccgttgcgttttttaacgtgccgcgtcatcggccaaccgccaaattcctgattggcagcggcaaggtcgaggaactgcgcgacctggtccacgccgaagaagccgatctggtgatcttcaatcacatcctcacgcccagtcaggaacgtaacctcgaacgtgtcttcgagtgtcgcgtgatcgaccgtaccggtctgattctcgatattttcgcccagcgcgcacgtacccatgaaggcaagctccaggtcgaactggcccagcttgaccacatgagcacccggctggtccgcggctggactcaccttgagcgccagggtggcggtatcggtatgcgtggcccgggtgaaacccagctcgaaaccgaccggcgcctgctgcgggttcgcctgcgccagatcaagggccgcctcgagaaagtgcgcagtcaacgcgagcaatcgcggcggggtcgttcccgcgcggatatcccaaccgtgtccctggtgggttataccaacgccggcaaatccacactgttcaacaacgtgacgaaatcggacgtgtacgcggccgaccaactgttcgccaccctcgacccgaccctgcgccgtctggaccttgacgacctggggccgattgtcctggccgataccgtgggtttcattcgtcacttgccgcacaagctggtcgaggcatttcggtctacgctcgaagagtcgagcaattccgacttgctcctgcacgtgatcgatgcggccgaaccggatcgtatgttgcagattgaacaggtgatgctggtgctgggcgagattggcgcccaggacttgccgatcctcgaggtctataacaaactcgatttgcttgaaggcgttgagccacaaatccagcgcgatgagaacggcaagccccagcgggtctggctgtcggcgcgtgatggcagtggtctcgagttgcttgaacaagcgattgccgagttgctcggcagcgatttgttcgttggcaccttgcgcttgccccagcgttttgctcgactgcgtgcacagtttttcgagttgggcgcggtacagaaagaagaacacgacgaagaaggtgtcagcttgctggccgttcgattgccgcgctcggagctgaatcggctggtcagccgtgaaggcgtggtaccgacagagttcatcgaacaacacactttgcaataaaagcctcctaaagcggttgtgccgcagtggcaggcattctgtagcattggtcggcgcgccgtgggtgcgtctttgctttatcagatggagagcgctatggcttggaatgagccgggtggcaactcgaataatcaggatccttggggtggtaaacgccgcaataatggcgaccgcaaggggccaccagatctcgacgaggccttccgaaagctgcaggaaagcctgaatgggttgttcggtggtgggaaaaaacgtggtggtgacgacggcggtcgcacaagcaagggcggtggctatggcctgctgggcctgggtcttgtcgtgctggcggccgtttggctgtacagcgccgtttacgtagtggacgagcaggagcaggccgtggtgctgcgcttcggcaagtactacgaaactgttggcccgggcctgaacatctacttcccgccgatcgacaagaagtacatggagaacgtcacgcgtgagcgtgcctacaccaagcagggccagatgctgaccgaagacgagaacatcgtcgaagtgccgctgaccgtgcagtacaagatcagcaacctgcaggacttcgtgctgaacgtcgatcagccggaaatcagcctgcaacacgccaccgaaagtgccctgcgccacgtcgtcggttcgaccgcgatggaccaggtgctgaccgaaggtcgtgaattgatggccagcgagatcaaggaacgcctgcaacggttcctcgatacctatcgcaccggtattaccgtcacccaggtcaacgtacagagcgcagccgcaccgcgcgaagtacaggaagccttcgatgacgtgattcgtgcccgtgaagacgagcagcgttcgcgcaaccaggctgaaacctacgccaacggcgtcgtgccggaagcccgtggtcaggcccagcgcatcctcgaggatgccaacggttaccgcgacgaagtggtctcccgcgccaagggtgaggcggatcgctttaccaagctggttgccgaataccgcaaggcgccggaagtcacgcgtgagcgtctgtacctggacaccatgcaggaagtcttcagcaacaccagcaaggttctcgtgaccggcagcaagggtgggcagaacaacctgctgtacctgccgctggacaagatgatcgaaggtggtcgtagcagcaccagcgcaccgtccaccggttccaatgccgctgccaacgaagcgagcgcccgtgcggccgctgacttgctgcaacagcaaacacgtaccagggagagtcgttgatgagcaataaatcgctgaccgccctgattgtgggcgtcgtcgtggtcatcgctgcctggaactgcttctacatcgtggctcagaccgagcgtgcggtgctgctgcaattcggtcgcgtggtccaggcggatgtccagccgggcctgcatgtgaaagtcccctacgtcaaccaggtgcgcaagttcgacgcccgcctgatgaccctggatgcaccgacacagcgcttcctgaccctggaaaagaaagccgtgatggttgacgcctacgccaagtggcgcgtcaaggatgccgagcgcttctacaccgcgacctccggcctcaagcagattgccgatgagcgtttgtcgcgccgtctggaatcgggcctgcgtgaccagtttggtaagcgcaccctgcacgaggtggtttccggtgagcgtgacgcgctgatggctgacatcacgcgttcgctgaatacgatggctgaaaaagagctgggtatcgaagtggtcgatgttcgggtcaaggccatcgacctgccgaaggaagtgaaccgcagcgtgttcgagcgcatgagcaccgagcgtgagcgtgaagcccgtgagcaccgcgccaagggtaacgaactggctgaaggtatccgtgcggatgctgaccgtcagcgtcgtgtactgttggccgaagcctatcgcgagtctgaagaggcccgtggtgatggcgacgctcaagctgcggcgatctacgccaaggcttatggccaggaccaggagttctacgcgttctaccgtagcctgcgtgcctaccgtgaaagctttgcgaacaaaaccgacgtcatggtgctggacccaagtagcgatttcttccgctacctggaaaaagccaagtaatcagctcgtcactgtgtaggaagcactccgtcgggcggctaaaacgcctggcggggtgatcctttcagaaaacgggtgtatgatgcggcagccgggaaattcccggcttttttgcgtctgcatgtttgattcggcaggcgtgacaggtttttcgaggaaagtgcccgacgaggccgattgcaggccgttcgtcacgtcgctcttgcgcgtggtttatgcaggcggcgcgcattttctgcttcactcaaggctcggccgagggctggccgcccggatcaaaggggaatggcgtaatggcaacggtagaccgctggctgctgccagatggcatcgaagaagtactgccaccggaagctgcgcgcatcgaaatagcgcgtcgccaggtgttggatctgttccagagctggggttacgagtttgtcgtgaccccccatatcgagtacctggaatccctgctgaccggcgcgggccaggacctggatctgcgcaccttcaaggtcatcgacccgcagtcgggccgtcagatgggtttccgcgccgatatcacgccgcaagtggcgcgcatcgatgcgcacaccctgcgccgtgaaggcccgagccgcctgtgctacgccggcagcgtgctgcacgcacagccgcgtgccttgtcgtcttcccgtagcccgatccagttgggcgccgagctgtatggcgatgccagcccgagcagcgacgttgaagtgatcagcttgatgctggccatgctgcaactggccgacgtgccggatgtccacatggacctgggtcatgtcggtatttaccgtggcctggcccgtgcggctggtttgtccggtgaagtggaacaacagctgttcgatgccctgcaacgcaaggccatcgatgaagtgatcgccctcacggctggcgtgcctgccgatctggctgacatgctgcgtgcactggtcaacctgtgcggcggccgtgaagtgctggtggcagcccgtgagcgcctggccaatgcgccggcgccggtactggcggcactggatgacgtgctggcaattgccgagcagttgtcggcgcgcttcccggagctgccgctgtactttgatctgggtgagttgcgcggttaccactaccacaccggcgtggtgttcgcggtgtttgtaccgggtgttggccaggccatcgcccaaggcggtcgttatgacgatatcggcgccgacttcggtcgtgcgcgtccggccaccggtttttccaccgatttgaaaaccctggtgaccctggggcgtgctgaggtcgagctgccgtctggtggcatctggatgcccgacagtacggacgcagcactctggcagcaggtttgccagttgcgcagtgagggtcagcgtgttgtccaggccctgcctggccagccattggccgccgcccgtgaagcggactgcgaccggcaattgattctgcagaacgggctttggcaagtatcgccactggcttcttgagttttcctgccggccatcgccggcaccaagtttgcgcgaatgaggacaagtgttatgggtaagaatgtcgtagtcctgggcacccaatggggtgatgagggcaaaggcaagatcgttgatctgctgaccgaacatgctgccgccgtagtgcgctaccaaggtggccacaacgctggccacaccctggtcatcgatggcgaaaaaaccgttttgcacctgatcccgtcgggcgtactgcgcgaaggcgtgcagtgcctgatcggcaacggcgtagtggttgcaccggacgccctgctgcgtgagatcaccaagctggaagaaaaaggcgtacccgtgcgcgagcgcctgcgtatcagcccgtcttgcccgctgatcctgtccttccacgttgcgctggaccaggcccgtgaaaaggcccgtggcgagctgaagatcggtactaccggtcgcggcatcggcccggcgtacgaagacaaggttgcacgtcgtggcctgcgtgtgggcgacctgctcaacatgccgcgctttgaagacaagctgcgtgaactggtggattaccacaacttcatgctggtcggttactacaaagagccagccatcgagttcgagaaaaccctggccgagtgcaaggaatacgcagagctgctcaagccactcatgctcgacgtaaccgccgagctgcacgacctgcgtcgcgctggcaaagacatcatgttcgaaggcgcacaaggctccctgctggacatcgaccacggtacctacccgtacgtgaccagctccaacaccaccgcaggtggcgttgcgaccggttccggcgttggcccgatgttcctggactacatcctgggcatcaccaaggcttacaccactcgcgtaggttcgggcccgttcccgactgagctgttcgacgacgtcggcgctcacctggccaagcaaggtcacgaattcggcgcgaccaccggccgtgctcgtcgttgtggctggttcgacgccgttatcctgcgtcgcgctatcgatgtgaacagcatctcgggcatctgcctgaccaagctggacgtcctcgacggtctggaaaccatcaacatctgcatcggctataaagatgccgaaggcaaggacgttgctccgaccgacgccgacagctacgtgggcctgcagcctgtgtacgaagaagtgccgggctggaccgaatcgaccgtgggcgccaagaccctggaagagctgccggttaacgcccgtgcctacatcaaacgtgtcgaagagctgatcggtgcgccgattgacattatttcgacaggtccggaccgcaacgaaaccattgttctgcgtcatccgttcgcttaataagctgttgatgtaaaaagcaaagggctccttcgggagccctttgtcgtttctgtcgcctgggcggcacgacccttgctttggttctttctttcgcggtgctatcaaattaatggcacccgtggtggagggattcccgatgtctgccgttctctcattgttacaaagccgtctgttgcggccagtgttcgttaccctaggtatcgctcttttggtgcaagtgctggtggcggtcgccctgacgcgaagcacggtcactgcactggaggcagatctgggcaatcgcctgggtgtcgacagccagaagctgtccggcgaattggcccaggctggcaaggaagtcacgtccagtctcgatagcttgtctacgagcacccgtcagcgtctaaccgcagggctctcgacccgcctgcaggaagagcagaagcaactgcgtgcgaccctggaaaaagacctgaaagactctgccaatgacatggcgcaactgctggcctcggtggcgccccgcgccatgtgggacagcgacgtgccgacgctgtcggagttcgcccggcgcgcccagcgcaatcccaacgtgctgttcgtggtctatgacgacgcggcgggcgagcacctgacgcgctacctgaaccgtgaaaacccgatcaaccaggcgttgttggacaagggcaagggtgatcgtgccctggataaagtgttggatgcggccaaagatgatccttcggtgttctacgtggaggcgtccatcagccccaatggcgtagagatcggcaaggtgcgcatgggggtttcgacggctgcggttgaggctgacctgcaagcgctcgataaacgttttgcggcgctgatcgccagcggggatcaactggtcggcgatagcctcaagggcgcggcggccgacagcgctgccgccatgggcgcccgcttgcaatctgcgcaagccacggccacccagatgacggccaataccacgagcgccgttcaggacgctgctggcaccctgcgctggcgtatcggcatggggctcgcgctggtcggtcttggcgtattgctgttgatcgctgtggtgctgggtcgccgtgtggtcaaccgcttgaagctgctgatcgcggccatggacgatttggcggcgggcgagggtgatctcaccaagcgcgtgcagatcagcagcaaagatgaaatcggcgacatggcttcggcggtcaatcgctttgtggataagttgcagcccatcgtgcgtgaggcgggggatgtggcccagcgtaccggtgtggaaattggtgccatgaccctgcgcaacgcaggtgccgatgcggccgccggcttgcagcgcgatgaagtggccgagagcttgcgcgcactgtcgcaaatggccgatgaggcgcaggccgaaagtcatgcgatgcaggcggcgttgcagcaggtggtggatatccgtcaggccacggacgagaactcgcgcacctcggctgaagtcggcagtttgatcgaggcgctggcggggcaagtccaggccggttccacggtcatcgagcgcctggcccagcaaagcgagcagatcgaggtggtgttgactgtcattcacggcattgccgagcaaaccaacctgttggcactcaacgcggcgatcgaagcggcgcgtgccggcgagaccgggcgcggcttcgcggtggtggcagacgaagtacgggcactggcgagcaagacccaaagctccaccggcgatatccaggcgcatatcgtggcgttgcagcaaggcgcgcgggaggcggtggaaaccatcggcaaggctgggcgtcaggcgaatgagggcttgctggtgctgcgtgacagcgtgcgcttgcagcagacggtgcaggcctcggtggagcaggtgcatgccgcgattggtttggcgacgcgtgcagccgagcaccaggcccagggcgcccatgcggtgcgcggccgggtcgaggtgatccacgcccaggccgagcgtgctgctcaggcggtggtggagactaccgccagtggcaaggtgctggatgggttggcggcgcagttgaaggcgagcctggggcagttcagggcctaggtggatagccagatggacgggcaggctaattagtcttgaatttggctacatactcattcaaatgttctccagggaagcatattggcgctggggggcatcgtctcagtattatggggttagcgatgctgcgatggtgccaatgcgccttttttcaatagttttgccgcaactcgaaaaaggtcgggcatatctaagcgaccgtcattccgccgatacattacacctatctcttcaagcatcttcgagagttcttcctccttatgtgcctcttggtttttaaagggcagaaggtagctgtgacgttttgcgtctgcaactaatgtctttatagttcctgcctttctccatacgtcaaatactgcatgatcatcttgcggcaagagtaggcctgctagaggcgctaggacccccttgatccatgggaattcttgatgcagttggtcgacacgtgtcttagaggcttcacggaggccatgtctgatgccatcaggagttaaaaccttgtctaggggcgcaacaccatatttcgctgccgcattcatcagtcccaggaagcttcttggtgtaacttccgcatgggcgtcagcagtatgtctcaacggccattcgtaggtgctgccttttttgaatgcatagctaccagttcccatatatgggccggagaattcaatcatcaagttcttctgatcttcctcgtcatggatcagagaccaccgccgagtcaagatggatttcctgctgggtttaggtagattattagctgtcagtagcttgttaaacgctttacgagtgtcttccttacttgatgaggctagtcgcgaatacagaaggccatagaggtctgtccaagaccacgccaagcggactgccccagttcggagtttcggaagttctacgaatcgtagtgcatcatcctcaatctggtcaggacgtaaaaaaagtttgacgcgaatagagcggtaggcgcgcatagcccataccacttccaaaagggcctctgtcagcagccgtcgccgcggccatgtgcgtgctacggtatcgagcgcgtcatagacaatcagtaaagtttttccttcgtcacgaagccggtgctcatgatcaatgagcagatcttctcgaagctcccaatccattccagcactgataaatttccccggtctgctactaagctttcctgctgactgagccgctgcacttaaaatagttgcccaccaaaaagctttagcttcatcgagcgcagcggtagcaggtacatatttatcaatcgcttcatgagatatgccatcagggcctccgacgccagtgtatccaaaccgaacaatcagttcagagaggcctagcttgggataagcaatagctgcttccttcagtgtttcagtctgaccaagaacacttgaccaaaaacttttgccgctgccgcgcgatcccacaacaattggaatcattggatccagcgcaacagcgtgtttttctggtgcatagaggtcctcaatttttgccacatgggcgccaaccgcatcattagatacgtcgcctgggaattgagcgacggcgttacgaagtgctcgaaagtcgtcttgggaaagattcatttttattccaggagctgagggatgctattgtttatcttgtctagtagttcctgataggaggagctgtagatgctgttttcgattaggtcgcgttttattaaaggattgaagcttttgtatcgtgagtcgtcgatgattgctaaaggggtgaaataattagggtcttcagctggtagcacatctgcgtcggaaatctcatcgtcccactccaactgatcaaagtcgctgatctcatggttgatctcgttaattgggcttttctggtgaggccctagtccgatagtagtaaacaagctttcgcaacgttctgcaaagtctttgcgaagctccgattctgcgggagctttgccttggataattgtgaatcggcttagccagccaggcaattgctcggcgttagtgaacttagccatatgggatagtagaattctaaagccttgaaaggtttgtggctcatctagtccgaaaaggaatacttccgcccctaaacctaataacgcagaagcagtggtttcgtgaaggccggcacgagcatcgaccaggataacgtcataccgacgcggatcagaaaactggtcgattagtgatgaaatttggtcaagaaccgtaattacttgtccttcgggggtaatgtcctcggcgtaagcccgagcaatttttgctaggacttcagacggattatttattgagcgccgacccaagacaggtataacgtctattcggccgttattaccagtcaatggtgacgggctgactaagtcggccaagaaagtttcgtccagtgctgtaagtccattttcaactaaggcatctagcaagccaaactcagggagcgtgtcatcgttcagaagaatagcgccgagccctggagcctcaatgtccaaatctatagctaaaacttttaagccgcgagcagccaaatccgccgctacaactgcaagcgctgtcgatcgcccaactccgcctttaatgcttgaaaagacgaagcgcggtggcgctgagttaggtggggctggggcgcgtagccaatccgctccaaccagacgtctatctattaggcgaattttccgcccttctatgataagggaagttatcgtgttttcgattaataaatcactgactccatattccgaaatgtcagctaccagttgatcgtctcgggcgtagtgcttaagggacgaccgcagtgatgtcgatagttgctcgatagtcgctggagacaaaatcgagttactaaaaaatgccaatctgccggtggtgtcgcgtaatacgacaccgtcagaaagtgcctcatctccaagctgtctagccactgttgtggcaagtattctaaggctgtcatcgaagtgaacgcgcatcaataaatcctcaggtaccaatagagccaattacgctaacggcctgcgctttccactgatccaacagtctggttgggatttggtttcctttgctgtagcgcatcgttatatcccaatctgaaaaaaagttgtcgttcagaacgtgtctgcgtaaaacagtggcatttctgccttcaagcttgtttctgagtagcgttttcagcgttggaaagtgtgcgaaaaaggggtcattttcacggctcgcgagtggcctgaacccgatttcaagcatcaatgcctttactccgcattcggcagcaattccgtacaagtaaccagcaacatctctgcggttagtagggtctagaatgtcagctgcttccagatgtcgtctcgctgctgctctcatgtctggggcgtaaggcatctatctctaaccttcaaaaaatgaaggaacaatagtcgttcggatggctgaaatccattgtaatttgttactagggaatatgcgcgtttgagggcttagcgactcaggtacatccgggttgtcagcagataaaccggcaaccccgacaccaaaatcaacagcgccgcataaggcgccgccgccgcgaactccacgttcgaggtatgcgcccaaacggctgtggccagggtattcaacccggtcgggctcagcagcaaggtagccgtcaattccttcatcgcatccaggaataccagcgcaaacgcagcacccaatgccgggaagataatcggcaaggtcacccggcaaaacgcgctgaacgacgacgcgcctagagtccgtgccgcctcttccaattgcggcgccgccttgttcagcgccgtacgaatcggtgcctgggccagcggcaaaaacaaaagcgcataagcaatcagcaacaacgccgaggtctggtacagcgctggcacgtaatgcagggcgaaatacaccagactcagtgcgatcaccaggccgggcaaggcgtgcagcaagtaaggcaggcgctcggcccagatcgccagttggcctttgtagcgcaccaccagcagtccgaccggcaccgccagcaccaggcaaagcgcggcgccgccgagcgacagcgccagggaggacagcaacgcctcactgatctcggccagcggaaatgcagccgacgaacctactgccagccaataaccgagcatccccaggggaatgccgctgccgatgatcgccagcgccaggcaatacacctggctcagtggcgcccacttacccaatcgaacctgctccgcatgtcgcgctgcgccctggccaatgcgcacgtgccggcccttgccgcgcacgcgcagctccagccatagcagcgtcaggcacatcaccagcagcaccgccgagagcatcgcggcattcgcattgctgaattccagctcgaactgttggtagatcgcggtggtgaaggtctgcaacccaatgattgacagcgcaccgaactccaccagcatgtgcagcgcgatcagcaatgctccagccagcagcgagggccacaacaacggcaaagtcacgcgaaagaagatgccccagcggttcagtcccagggtacgggccgactcttccagtgcgggatcaagattgcgcagcgttgccgccaccggcaagaacaccagcgggtacttcgacaggctcatcaccaggatcgccccgccgagcccttcgaaactggcgctcaacgacacccaggtaaagctgctgacaaacgccggcaccgcaaacggcaggcacaggatcacaccccagatgcgccgccccggcaggttgctgcgctccagcaaccaagccagggacaggccgatcacgccgcacgctaccgttaccccgaccatcagcgccagggtgttgcgcagtaacccaaacacatacggtcgccacagcagatgcaccgcctccgcccagcccgcttgccaggccttggtgccgacgtacgccagcggcagtaggctcaagccaaccagaaatagcaccggtagcaacagccagatcgacgggcgcttgcgccgcgggctgaaccctgtgcgcagggcgggtagcgatgggttcatcagttcaagccaacgtcacgttccaggtccagggcttcttcggcgttgcccaggtcggccggggtgactttcggcggttgcagttcgctgaaaggcttgagaccgcgattggattccatacccttgcgcagcgggtattcggccgaggtattggtgatcacgcgctggccttcttcactggccatgaatgccaacaattgctgggcttccttggggtgcttgctggatttcagcgcggcggcggaagacacggtgatcaggccaccggcgtcgccattggtgaagtagtgcagttgggaatccagattggtcttttctttcttcagggcgaaccagtagtagttgttcaccagaacggtggccacttcgccgttttcgacggctttcagcgcaaccatgttgttgctgtacaccttgccgaaggcgcgcaggccggtcagccattcttcggcggcttcacgaccgtgcagcttgatgatcgccacagcctgttcctggaacgcgccgctggtcggcacgaagccgaccttgccttgccactcggggccggcaaagtcgagtaccgatttgggtaggtctttttcggcgatcagtttcgggttgaacgccacgacacgggtgcgtgcggttacgcccatccagtcgccatgggcgccaacataatccttgggcaatacgtcgagggtgctggcgtcgatcttggccagcaggccttgctcgccgagtttgttcagcggcggcgattcttcggtgtagatcacgtcggcaggggagcggtcgccttcttcgacgacctggctggccagctggttgctgctgcctttgcgcacgttgacgtggatgccggtcttggcttcgaaggccttggcgagctcgtcgccgacttctttgtgctggccgttgtacagggtcagggagaccttgtcggcggagtaggcggtgggggagagcaaggtcaggccgagcagagtgagggtcaggccacgcagaagggatgtcttgagacgggtatcgcggatggtcatccgaagttttcctcgcttgtgtgcaacaaatcattgcaaggataaacgataaagtttctcaggtgcggatgcaggtggaaatcgacagggaagttttcaaaccccggaaacgaaaaaacccgctttcgcgggtttaatctgaatttggtgcccaggagaagactcgaacttccacgaccttgcgatcaccagcacctgaagctggcgtgtctaccaatttcaccacctgggcattatcaacaacgcttgcgctgttgatggagcgaactatacggagggctttttgatctgtaaacccctgattcaaaaaaataaatcaagttttccgttaaaaatcaaagccttgaaacgaaaaaacccgctttcgcgggtttgatctgaatttggtgcccaggagaagactcgaacttccacgaccgtaaggtcaccagcacctgaagctggcgtgtctaccaatttcaccacctgggcattatcaaacaacgttgccgtcgtcgatggcgcgcactatacggaggggattttaagctgtaaacccccgccacgaaaaaagcctggaaaatttcgccagtggtcgtgcaaggtgcccgttgcgggctgcaaagggctttaaaaggcttgttgacgtctgaaatttcccgtttcaatacgcgtatgccaaactaacccgcatatagacaaggtgaaaactctctaatggccgattggcagtccctcgatcccgaggccgctcgtgaagcggaaaaatatgaaaaccctattcctagccgcgaactgatcctggcgcatctcgccgatcggggttcgcctgctagccgcgagcagttggtcgaagaattcggtctgaccaccgaagaccaactcgaagccctgcgccgccgcctgcgcgccatggagcgcgacgcacaactgatctacacccgccgtggcacttacgcgcctgtggacaagctcgacctgatcctcggtcgcatcgccggtcaccgtgacggcttcggctttctgatcccggacgacggcagcgacgatctgttcatgagcccggcgcaaatgcgcctggtgttcgatggcgaccgtgccctggcgcgcgtttccggtctcgaccgtcgcggtcgccgcgaaggcgtgatcgtcgaagtggtgtcccgtggtcacgagaccatcgttggtcgctacttcgaagaaggcggcatcggttttgtcgtgccggacaaccccaaggtgcagcaggaagtgctgatcaccccgggccgcaacgccaacgccaagatcggccagttcgtcgaggtgaagatcacccactggccgacgccgcgcttccagccgcagggcgatgtgattgaagtggtcggcaactacatggcgccgggcatggaaatcgatgtcgcgctgcgcacctacgatattcctcacgtctggcctgaagccgtcgtgaaagaagcgcgcaagctcaagccggaagtcgaagagaaggacaaagagaagcgcatcgacctgcgcgatctgccgttcgtcaccatcgacggcgaagacgcccgcgacttcgacgatgcggtctactgcgaggccaagccaggcaagctgcgcctgttctccggcggctggaagctgtacgtggcgattgccgacgtctccagctatgtgaagatcggttcggccctggatgccgaggcgcaggtgcgtggcaactcggtgtacttccccgaacgcgtgattccgatgctgcccgaggagttgtccaacggcctgtgctcgctgaacccgaaagtcgaccgtttggccatggtgtgcgagatgactatctcgaaaaccggcgaaatgacggactaccagttctatgaagcggtgatccactcccaggcgcgcctgacctacaacaaggtcagcaccatcctggagcagccgaaaaccagcgaagccaaagccttgcgcggcgagtacggccatgtcgtgccgcacctcaagcagctctatgcgctgtacaaggtattgctgggcgcacgtcatacccgtggcgcgatcgattttgaaacccaggaaacccggattgtcttcggttccgagcgcaagatcgccgcgatcaccccgaccacccgtaacgatgcgcacaagctgatcgaggaatgcatgctggcggccaacgtggccaccgctgaattcctgaagaagcacgagatccctgcgttgtaccgcgtgcacgacggcccgccgccggagcgcctggaaaaactgcgcgcgttcctcggtgaactcggcctgtccctgcacaaaggcaaggacggcccgacgccgaaggattatcaggctctgctggccagcatcaaggatcgtccggattaccacgtgatccagaccgtgatgctgcgctccctgagccaggcggtgtacagcgccgacaaccagggccacttcggcctgaattacgaggcgtacacccacttcacctcgccgatccgtcgttacccggacctgctcacgcaccgcgccatccgcagcgtgatccactccaaacagaacactccgcacgtcaagcgcgccggtgccatgactattccgaaggcacggatctatccgtacgacgaagcggccctggaacagctgggcgagcagtgctccatgagcgagcgccgcgccgacgaagctacccgcgacgtagtgaactggctcaagtgcgagttcatgaaggatcgcgtaggcgaatcgttcccgggtgtgatcacggccgtgaccggctttggtctgtttgtggagctgaccgatatctacgtcgagggcctggtgcacgtcaccgccttgccgggcgactactaccactttgaccctgtgcaccaccgcctggcgggcgagcgtagcggtcgcagcttccgtctgggcgataccgtggaagtgcaggtcatgcgcgtcgatctcgacgagcgcaagatcgacttcggcatgcccgacaagcccgcagaagcgccgggcagccgtaaaaaacgtggcagtgaaaccacggctcccgccagcaaaggcaagggtgctccagctaaggtggctgcagagccagcgcctgccaaggccggtcgccgctcatcgaccaaggaaaaggcccccgaagcctaccgcccaagcgacgcagcggcgaaaaacgccgaactgcgcaagagtcgtgagttgaagcagcagttgctcaacgaagccaaaagcggtggtaaagcggcgtctgggggaaagtcccacggggcggaaaagccgtcgagcaagcccagtaaacaccgtaaaggcccgccaaaagcgggttcggctcccgcgaaaagcggcggctcgcgcaaacctaaggccaagtcatgagtctggaaaaaatctacggcgtccacgccgtggaagcactgctgcgtcaccaccccaagcgcgtcaagcaagtctggctggcggaaggccgcagcgagccgcgcgtacaagcgctggttgaactggccacgcaaaacaaggttgccatcggccaggccgagcgtcgtgaaatggacgtgtgggtagagggcgttcaccagggcgtggtggcggatgtcagcccaagccaggtgtggggcgaggcgatgctcgacgagctgctcgaccgcaccgaaggtgcaccgttgctattggtgctcgacggcgtgaccgacccgcacaacctcggcgcctgcctgcgttcggcggacgctgccggtgcgctggcggtgattgtgcccaaagacaagtcggcgaccctgacgccggtggtgcgtaaggtcgcgtgtggcgcggccgaagtgattccgctggtggccgtgaccaacctggcacgcaccctggagaaactccagcagcgtggcctgtgggtcgtgggtacggcgggggaggccgaggtcagcatttatgaccaggaccttaccggcccgaccatcctgatcatgggcgccgaaggtaaaggcatgcgtcgcctgacccgtgagcactgcgattacctggtgcacctgccgatggccggtagcgtcagcagcctcaacgtgtcggtggctaccggcgtttgcctgttcgaagcccagcgccagcgtggcgcgaaggccaaggccaaaccgaagaagtaatcaaaatgtgggagggggcttgcccccgatagcggtgtgtcagttgcagatgatgtggctgatcctccgtaatcgggggcaagccccctcccacagtcgttttggggtgcttggaagattgttcaaataatcaccaatcaccttgcgcgcatcctcccccttctctacaattgcgccccttgccttcctggcgggcaccgatgtgcctccctgcggcaagatccataagtgtcattcactccttgtctgaccgtttttgagcggcaggctacaacccgtaaggagcattcatgcgtcattacgaaatcatctttttggtccacccggatcaaagcgagcaagtcggcggcatggttgagcgttacaccaagctgatcgaagaagacggcggcaaaatccaccgtctggaagattggggccgtcgtcaactggcctacgcaatcaacaatgttcacaaggctcactacgtgatgctgaacgttgagtgcactggcaaggccctggccgagctggaagacaacttccgctacaacgatgcagtgatccgtaacctggtcatccgtcgcgaagaagccgttaccggccaatccgagatgctcaaggctgaagaaaaccgcagtgagcgccgtgagcgtcgcgaccgtcctgagcacgaaggcgctgatagcgttgatagtgatgacagcgacaacagcgataacgctgacgagtaatccacggaccttttaaggagcctatcaaatggcacgtttcttccgtcgtcgtaaattctgccgcttcaccgctgaagacgtgaaagagatcgattacaaagatctcaacactctgaaagcctacgtatccgagaccggcaaaatcgttccaagccgtatcaccggtaccaaagcacgttatcagcgtcagctggccaccgctatcaagcgcgcccgcttcctggccctgctggcctacaccgacagccacggccgctgagaccgggcagtcgacaagtagtaagggattgaatgcatgcgcgccttagctgagttcatcatgcgcggtcgcgtgcaggccactctggtagtggctggatgtgcagcattgccgttgttgtattggttgggtgctgccgcaggttgccttgtgctgctgcggcgcggtttgcaggatgcccttggcgtcctggccctgggagtgctggccgccttgatctggtggctgcaactgggcgaacccaaggtacttctggtgttgctggggtcgtcgagccttgcgttggttttgcgcgcaagtgagtcctgggcccgcacgctgctggtcagcgtggcagtggggttggtgttttcggtgttgatcgacgcggctttccgcccgcagatcgaggcgctgtcgcaagagatcgtcaagatcctgccgatggccctcggggaactctaccagcagctttcggtagatgagcgagcgcgtcttgcgacactgattgcaccggccctgatcggcctgatggcggtaatgatgcagatcgtcagcgtgctgagcctgatgcttgggcgttattggcaggcgttgttgtacaacccgggtggttttggtcgcgagtttcgcagtatcagaatccccgtgggcccggcgatgttgctgctggcactcatggtggtcggaccgtacttcggttcacaagccaccttgctggtgctgttttgcagcgtaccgctggtgttcgccggactggccctgattcacgggctggtcgcgcagaagcgcctggccaagttctggctggtggggatgtacgtaacaatggtgctgttcatgcagctgatctatccgttactcgtggttctggccattgtcgacggcctgattgattttcgcggtcgtctggcgccgaaagacgccgataacgcgaacggtgaaggttaaaagttagaggattttcacatgcaactgatccttctggaaaaagtcgccaacctgggcaacctgggcgacaaagtgaacgttaaggccggctacggtcgtaactacctgctgccatacggcaaagccaccgctgcaaccgctgccaacctggctgcgtttgaagagcgtcgtgccgagctggaaaaagccgcagcagacaaaaaagcttcggccgaaactcgcgctgcccaactggctgagctggaagtgactatcactgccaccgccggtgacgaaggcaagctgttcggttcgatcggcacccacgacatcgctgatgcactgaccgcctccggcgttgaagtgcagaagagcgaagttcgtctgccgaacggcaccatccgcaacgtaggcgaattcgacgtagccgtgcacctgcacgccgaagttgaagccaccgtacgcgttgtcgtggtagcagcttaagccgcacctaactgactggcacctcgcgtgccaggcggttaacatcgggcacgatcctgtttacaggtcgtgccttttgtttttctacacacccccaaattccaagtggccatgaacgatatttcagctcctgagcaatacgatctgcaaaccgctgccctgaaagtgccgccgcattccatcgaggccgaacaggccgtgctcggtggtttgatgctggacaacaacgcctgggagcgcgtgctggatcaagtctcggacggtgatttctatcgccatgaccaccgcctgatcttccgtgccattgccaagctggccgaccagaactcgccgatcgacgtggtgaccctggccgagcaattggacaaggaaggccagacctcacaagtcggcggcctgggctacctgggcgaactggcaaaaaacacgccgtccgtcgccaacatcaaggcctatgcccagatcgttcgccagcgcgccacgttgcgccaactgatcggcatcagcaccgagatcgccgacagcgccttcaaccccgaagggcgcaccgccgaagagatcctcgacgaagccgagcgccagatcttccagatcgccgaggcccgcccgaaaaccggtggcccggtgggcgtcaacgagctgttgaccaaggccatcgaccgcatcgacaccctgttcaacaccgacgccgccatcactggtatttccaccggttatgccgacctcgacgagaagaccagcggcctgcagccgtccgacttgatcatcgtcgccggtcgtccgtcgatgggtaagaccaccttcgcgatgaacctggtggaaaacgccgtgttgcgcagcgacaagaccgtgctggtgtactccctggagatgcccggcgaatcgctgatcatgcggatgctctcgtcgctcgggcgtatcgaccagaccaaggtgcgttccggccaactggaagacgacgattggccgcgcctgacctcggcggtcaacctgctcaacgaccgcaagctgttcatcgatgacactgcgggcatcagcccatccgagatgcgcgcccgtacccgccgcctggtgcgtgaacacggcgacatcgccctgatcatgatcgactacctgcagttgatgcagatccccggttccagcggcgacagccggaccaacgagatttccgaaatctcccggtccttgaaagctctggccaaggaattcaactgcccggtggtggcgctgtcccagctcaaccgttccctggaacaacgccccaacaagcgcccggtgaactccgacttgcgcgaatccggcgcgatcgagcaggacgccgacgtgatcatgttcgtgtatcgcgacgaggtgtaccaccccgagaccgagcacaagggcattgccgagatcatcatcggcaagcagcggaacggcccgatcggctttatccgcctggcgttcatcggtaagtacacacgcttcgagaacctcgcgccgggcagttataacttcgacgacgacgagtaaaacccaggctcaagggcgcgtctcggggagcgggccgaacaacgcgcggatggtcggttcgttgtactggtagttccagcgcagctcggtgccggcgcaaatatcctcacgggtaaagaatgctgttagcctcagtgattcccgaggttgctcgcctttctgggtctccacattgaaatacactgcttcgacgttgtagccaccgcttgcctggcgcaccgggtaaccggcttcgtagtcaaagatagtgttcatgcgcgacagcacgttatcgcctgagagcacgacttcgcggttgatggggctcgcggtcgtctcgtgtggaatctgataggggcgcacgtcgatcaggtacgggtcccggcgaaacccggcgatgtgatggggcagtaaaccgccgccgtatactcccagcacttctcccttcgtcaagtctttcgtgctcaccacgcacgactgtcctatcaataccgactcttcggcgaagcggcactgggcttgagtaaagggcaccacttcgattttttcgtcatacaactgcgcaaccttttcataaccttcccactggatgtacggcagtaccggctgcttgtcgaacagcgcaccgctcgttggggatttgccctggctttgcatggctttgatgcgcatcggttggccgtccacatcgcgtaggggatagcggccattgttggcgcggtcgtagaggcctcggtaattctgactgaactggtacgaggcgtgggagcgcatactgcgcagctcgctgggcccgtatggatgaggtgggttggggaggggcgacggtagactttccagcgctgactcatagtcgacgttcgagtcggccgattcgaacagctcgctggacgtggagccggagcgcctcctggggggtgtcggcatcccgcccagtagtgcatccttctgcggatcaatctgccagccgccctctgcgttcttgccgatatacggttggtaggccctgaagcggctgcgggcgtcaagcaaacgccaccccagcgcgtcggctttgaccagatagtagttgccggactccagcacgtaatagcggtagctgccatccggcaggggcggggcttggtagacgccgtctgcgcgcaaggtcagcccttcggggggcgtcgggctggcgaaaagcgggtcgaaaggcagccccggtacagcaggggagtctgcccacggtgttggcgcacgtttgggcggcgcgggtttggccagcagttcgaggctggccttgcgcaaggcgctgggcaggtccgcaactcccgactggcgcagcacgtgactgcgctcgcggtctgaaaggctttgatcgatagccgtgagcaggtcggctggtgcgcccagcgcttggccttgagcggtatggcaagtgaactgctctcgttcatgcaccagcaagtgcccggtgtcgttttcgccggctccgttgctatagagcaaggggccggtgagcgtttgctcgcggatctccagtcgactggatgttggccagccgggcaaagactccagtgctgtcagcaccagcacagggtagtcggggctgcgggttgtcttcaggtagaggctttcgtaggcacgatggacgctggattggttcaggtattggccgaattcccaatgctgttgcgcggtgagggagcgttccagctgtaatcgctgctgatctgcgaagctcagcccgcaggtcgcctcttccagatgatatttcgataggccgggcaggatgtcacggatcgtctgctccagcgcagacgcgggttgttcggcgcggtcgttgagccaggtaaacacgcggtctgcgtgctcatgggcctcggccgccagggtgaatgcgaggttttcgacgttgctggagcgtccgacccgtctggcgggcagttcattgaactgcgcttgggtcagttgttcttccaggcagtccagcaactcgcctttgcgaaagcgtgcttcagggactgtgatttccagcccctggttgccgtggctgaacaggacccgttgctgttcatcgaccaccttcagcacgcggttcgtcggccattttggcaaggataccagcaggtgaaactggataagtggagagtgtcgactcacttcgctgccttcggcacgggcgaagttgaagtcttcgatttcctgcgccaggttgaagcgcctgactgtgtcgcgcaggcccggcggcgggcgtacgacttcctgatgcgcctggcgcagcaggctggcgtcggcaccactgacccgcaggatcggctccaccgctgatgccttgatgtttgacgcatcagggcccagccgcttgatcagtttgaagtcgtcccaatcgcgggcggtttcgtgttcctggcgccacccgccgacgtcattgctgagcatctgcggctgataggcgcgcgggtcgctggggtgttgcaggcgccattgcgaggtgcgcgggtcgcgggccagggcgtgcaggtggtcatcgagagacacgtaatgctgcccctcgtagtgctgcagcccctgggcgtcgaccggcacctgcgctggcagtgtcttgagttggcggtacggcaccatgtccgggttccacaggcgcatgccctgttcctgcaccttgaccgcgatcaaccgcgcgccgaaccctccggctttcaccgcgcctgcggtagcgacgccctgggcgacggtgtccaccacgtccatcatgtcattcagggcctggtcgctgtcccctcggctccaggcggcaaacccgttgtaaaggctgtcgaccagctgtgcggctgttaccaccagcagcacttcgcccacgatgggaatgaatgacgccgcgaagaacagtagcgacttaccggtctcggcaaagtaatgcaggcgtttctgccggctcagggcgtcggcatctgccgttggcaccgccagggtgcgggcgtcgtcgcggatctgttggatacgttgtatggcgaccgcctggaacgcgtcgccctggatcagggtacggctgactttggcttcaaggcgggccgcaatcaccctggcgggagagtcgatgcgtggcgcgacggtcctggcgggcagcaccgtgagcagcgtgccctggtgtcgaagcggtaccagtcgctggaaaaaaccgaagtaggcgggctgggccaggcgttgtaccagcgagtgttccagggactccattgactcatgcttgcggaacgagccgacgggatcgtcgggtatatagagcagttgctgtcgatccacttgcgtatcgtggatgaccagcacgctcggcagcaccacgccgcccagggtcaggtggttgcattgcaggtcgggatggccgccattgcgggccagggccagtagagtgctgtacagtctttgatcaatccagcccctcaaatgagcgatatgcgaggcggtttcaaaccgagtctgttcacttcgggaaaaaagctggcgtacctgcacggctgcctggggtgtgtccttgggcgcaagcagcgtctcaaggtgttggaggtaatgcttgcccaggtcgaggctgcgacagaaaccggcgaacatgatcggtgagatgggctgccgggttatcgcggcgccatacacgttgtaaatggccgatccggcttccatcccgccatcctcggcttcgcccgcttcaaagttctgcagtgcggcttccaacaggggttgttgggtggtcctggcgtgggtcttgatcaggcccagcaggtgatggtttttccattcgcgcaacacaaccccacgctcactgtcgagcaggccgaagaaggtgctctggagcgcgctttcgaaatacggccgggcgtactccgaagggcttttgagctggctgagcagcgccttgaggttgtgccgggcctggttgttgtcgaccaggctgcggcgcaagtcatcccgcagcgtcttgtttgcccgggtgagccagggaggcaggtttttctgaatgaactcagcgtgggcctgcagcacggggggcttggccgtttttggcgtcagggcgctcatggcgggtcctagggtgggttggtttgccacaggttacccacgaagatttcccggaatggctagccgggtagtgcgcggcaatgggcgaaaccctatagcgactcggcctggaatgacggtgtggcaaaagccgaccattgccgtcggaattggtcaaaatttgtgctatattccgcgcccgcgattttccatctcaacaccggtcaccgtcatgcaaacagccaagccgttatttgactatcccaagtactgggccgaatgtttcggtccagcgccattcctgccgatgagcagggaggagatggatcagcttggctgggattcctgcgacatcatcatcgtcaccggtgatgcctacgttgaccatccgtcgttcggcatggcgatcatcggccggctgctggagtcccagggcttccgcgtcgggatcattgcgcagccgaactggcaatccaaagacgacttcatgaagctcggcgagccgaacctgttcttcggcgtcgcggccggcaacatggactcgatgatcaaccgctacaccgccgacaagaaaatccgctccgacgacgcctacaccccaggcggcatggccggcaaacgcccggaccgcgccagcctggtgtacagccagcgctgcaaggaagcctacaagaacgtgccgatcgtactcggcggcatcgaagcctccctgcgtcgcatcgcccactacgactactggcaggaccgggtgcgcaactcgatcctgatcgacgccaccgccgatatcctgctgtatggcaacgccgagcgcgccatcgtcgaagtcgcccagcgcctgtcgtggggccacaagatcgaagacatcaccgatgtgcgcggcaccgcgttcatccgtcgtgacacgccggccggctggtacgaagtggactccacgcgtatcgaccgtccgggcaagatcgacaagatcatcaacccgtacgtgaacacccaggacacccaggcctgcgccatcgagcaggaaaaaggcccggttgaagacccggaagaagccaaggtcgtgcagatcctggccagcccgaaaatgacccgcgacaagaccgtgatccgcctgccatcggtggagaaagtccgtggcgacgcagtgctctatgcccatgccaaccgcgtgttgcacctggaaaccaacccaggcaacgcccgcgccctggtgcagaagcatggtgaagtggacgtgtggttcaacccgccacccattccgatgaccaccgaagaaatggactacgtgttcggcatgccgtacgcccgcgtcccgcacccggcttacggcaaggaaaaaatcccggcctacgacatgatccgcttctcggtgaacatcatgcgtggctgcttcggcggctgcaccttctgctcgatcaccgagcacgaaggccgcatcatccagaaccgttccgaagagtcgatcatccgcgagatcgaagagatccgcgacaaggtgccgggctttaccggcgtgatctccgacctcggcggcccgaccgcgaacatgtaccgcatcgcctgcaagagcccggagatcgaatccgcgtgccgcaagccatcgtgcgtgttccccggtatctgcccgaacctcaacaccgaccactcgtcgttgatccagctgtaccgcagcgcccgtgcgttgccgggtgtgaagaagatcctgatcgcctccggcctgcgctacgacctggccgtcgagtcgccggaatacgtgaaagagctggtcacccaccacgtcggtggctacctcaagatcgccccggaacacaccgaggaaggtccgctcaaccagatgatgaagccgggcattggcagctatgacaagttcaagcgcatgttcgagaagtacaccaaggaagcgggcaaggagcagtacctgattccgtacttcattgccgcccaccccggcaccaccgatgaagacatgatgaacctggccctgtggctcaagggcaatggcttccgcgccgaccaggtgcaggcgttctacccgtcgccgatggccaccgccacggccatgtatcactcgggcaagaacccgctgcgcaaggtcacctacaagagcgacgcggtgaccatcgtcaagagcgaagagcagcgccgtctgcacaaggcgttcctgcgctaccacgacccgaagggctggccgatgctgcgtgaggcactgacccgcatgggccgcgccgacctgatcgggccgggcaaggaccaactgatcccgctgcaccagccgagcaccgacagctaccagagcgcccgtcgcaagaactcgacgccggccggcagccacaaggtcgccaaggaaaccaccaccaggatcctcacccagcacaccggcctgccgccgcgtggcagtgacggcagcaacccgtgggacaagcgcgaacaagccaaggccgcggcccaggcgcgcaacaagcaggccgccaaggaacgcgccgatgcggccaagggcaagggcggcaagcctgcgcgcaagccggtcgtgccacgttgatcacagcctgaacatgccagacgccagcctcgtgctggcgttttgctttctagctgttgggtaacctgtttgctaaggtggcgcccattaaatcgctatcgcgggcaagccccctcccacattcgaccgcattccaaatgtgggagggggcttgcccgcgatggggcccgcctggtcaccatcattctcaaggaagaacactcatggctaaccccctggcctccatcggcatggactccaaccgctcgcagttcatggcgcgccaacgcatcgaaagccagatcaacctgccacgcctgttcgcggccattgactccgatccaggtatcgttggcgcaggcgtcgtatacatcgacgccgatttcaacgtcatcaccctgcgcgaattcaagcccatctgcagcatcaagcctaagcgcatcattttgcgtgaagcacagaagtacattgcgccgacgcagtttgctcaacatgtcgtgagcaatcctcgagagtcccgactgattggcgaagccgtcaataccggaatctcctgcctgggggctgtcatcagctgggctgcgatcgccagtggaaccattctggtgcctttcagtgccggcgccagttccgtcatcgttgtggtgggatatgcggctgccggtgcaagttcgctccagtgtttcaacggcattgctcgaacagcgctggaggtcgccaaaccggaggtaaacgattggctcgacagtgagggctggtaccagaatgcatccgttgtgttggacgccgtatcactggccggcgtaggcggttcggccctgacgacggtcaagctggtcagggctgccaaagcatcgacgggcaagagcctgcgtgacgtgcttcgcggtttgaatcgccaggaaagagccaagctgacgaaagagctgctcagcatcaaccatcccagcttgaccgcgaagatgctcaagttgaggcaggcgtcgggcgaactcaccaagcgtttcacccctacgcagctcaagcacagcaccactacccagatcaaagacgtcctcggcgcaaccataggatttggcgggagtgcgtactccggaaacgtcaataccatcgcgatagggttgtacgaggaaataaacgaatgaacgagttaatgacgctacgcgactttttcaggcattactttctgacgtttcttggcggtgtattcgctgcttacttttcgttggcgttggctgtggcgctggcctttgtcacctattttcgtgatgtgccccttgctcaagtggggctcaagatcatgtctgccggggcgctgctcattctgttgacggtccatagcaactttatgattttgcggggccgcccctcctgggtgtgggtgatggtcggcatctacgtcgcctgtctactgtttgtagttccgatgattcaattccagcctcacaaaattctttatgggttggcgctgttattcccattgctcggattattgacacttaacagcaaggttcaacgagagatgcgtcagaagctgcttgagatccgccacctgcgccaagccgtgatcgccaagcgcaaaaccggctgattgggtagattccccacccaccttcacacccgcgccacaaatatgtgcgtcacttgcaccagagcatcgccgttggcgccgttttggtgctgtactgcaccgggtcccacgataaagcgcaatgaccgccgctctggcataagtcttgcgcgctttgtgtccatgccctggctcgcaggaggccgccgtgtcgattcatgtcgcgttgcaccacgttacgcattaccgctacgaccgcgctgtcgaactcggcccgcagatcgtacggttgcgtccggccgcccatagccgcacgcggattctgtcctacgcactgaaagtgctgcccgagcagcacttcatcaattggcagcaagacccccagggcaattacctggcgcggttggtgttcccggagaagaccgatgagctgcgcatcgaggtcgacctggtcgccgagatggcggtgttcaacccgttcgactttttccttgagccctacgccgaaaaaatccccttcagctatgccgccgatgaacagcgcgagctggcgccgtacctggaaaccctgccgctgacgccgaagtttgcggcctaccttgcgggcatcgaccgtactccattgccggccgtggatttcctggtcggcctcaaccagcgcctggcggccgatatcggctacctgatccgtatggaaccgggcgtgcagacgccggaattcaccctggaaaacgcctccggctcctgccgtgattcggcctggctgctggtgcaattactgcgcaacctgggcttggcggcgcggtttgtgtctggctatctgatccagttgaccgccgacgtcaaagccctcgacggcccgtccggcaccgaagtggacttcaccgacctgcacgcctggtgcgaagtgtatttgcccggtgccggttggatcggcctggatgccacctctgggttgttcgccggtgaagggcatatcccgttggcctgtagtcccgatccctcgtctgccgcgccgatcagtgggctggtggaaccctgcgagtgtgaattcacccacgaaatgtctgtagagaggatttgggaggccccacgggtcaccaagccctacaccgaggaacagtggctggcgatccaggcactgggacggcagatcgatggcgacctgctcaaggacgatgtccgcctgaccatgggcggcgagccgacctttgtctccatcgacgatcccgacggcgccgaatggaacaccgccgccctcggcccggacaaacgccgcctgtccgccgagctgttccagcgcatgcgcaagcactacgcgcccaaagggctggtgcacttcggccagggcaagtggtaccccggcgagcaactgccgcgctggtcgctcaactgctactggcgccgtgacggcgtgccgatctggcacaacagcgcgttgatcgccgatgagcgagaggattacggtgcggacggcgtgatggccgggcgtttcctggccagcgtcgccgagcgccttaagctgccggcacgctttgtgttcccggccttcgaagacaatttctactacctgtggcgcgaaggtgcgctgccgcagaacgtcactgcccaggacccgcgcctgggcgatgagctggagcgcgaacgcctgcgcaaggtgtttgcccagggcctggataaaatcatcgggcaagtactgccgctggcgcgtacgcctgccaatgatcgttggcagagtggccgctggtacctgcgcgataaccactgccgtttggtgccgggggattctcccctgggctatcgcctgccgttggcctcgcagccgtgggtgacggcggcggagtatccgtttgtgcatccgactgaccctaaccaggatcagcccgagctgccgactaccgcccaactgcaaagccatggcgaacctgcgccgagtgatgagcgcgtgcccaaggtggacgagtctgccgactggctgacccgcaccgcgctgtgcgccgaagcgcgggaagggcggctctatctgttcatgccgccgctggagcgcgtcgaggactatctggagctggtggcggccatcgaagccaccgccgaagaactgcactgcccggtcttgctcgaaggctacgagccacctgccgacacgcgcctgagcaacttccgcgtcacgccggacccgggtgtgatcgaagtcaacgtgcagccgtccgcctcttgggacgagttggtggagcgcaccgagttcctctacgaagaggcgcggcaaacccgcctgactaccgagaaattcatgatcgacgggcgccacaccggcaccggtggcggtaaccatttcgtgctaggtggcgccacgcccaaggactcgccgttcctgcgtcgccccgatctactgcgcagcctgatcagctactggcacaaccacccgtcgttgtcctacttgttttccggcctgttcatcggcccgacctcccaggcgccacgggtcgacgaggcgcgcaacgatgcactgtacgagctggaaatcgccttcgcacaaatgcctgctcccggcgaagaatgcccgccctggatggtcgaccgcctgctgcgcaacctgctgatcgacgtgaccggcaacacccaccgcgccgaattctgcatcgacaaactctactcaccggacggcgctaccggccgcctgggcctgctggaactgcgtgcattcgagatgccgccccatgcacgcatgagcctgacccagcaactgctgttgcgcgccttggtcgcgcgcttttggcgcgagccctacgcaccgcctaagctggcgcgctggggtaccgagttgcacgaccgtttcctgctgccgcacttcatcgagcaggattttgccgatgtgatcgtcgagctcaacgcagctggctacccgctgcgcgccgagtggtttgccgcgcacctggaattccgttttcccaaggtcggcgactacgccgtcagcggtatcgagctggaactgcgccaggccctggagccctggcatgtgctgggcgaggagggcgcggtgggtggtacggtgcgctatgtggattcgtcgctggaacgcctgcaagtcaaactgaccgggctgccaccgcaacgctacctgctgacctgcaacggcatcccggtaccgctgcaggcgaccgggcgcgttggtgagttcgtcgccggcgtgcgttatcgcgcctggcaaccggccaactgcctgcaaccgaccatcccggtgcatgcgcccttggtgttcgatctgctggatacctggatgcagcgttcgctgggcggctgccagtaccatgtggcccatccgggcgggcgcaattacgacagcttgccggtgaatgccaatgaggcggagagccggcggatggcgcggtttttcaggcttgggcatagccccggcaagcttcccgtaccgacggtaaccgtcaacgatgaattaccgatgaccctggatatgcggcgccaccccaataaaaatgactgaacactgtttaaatgtgggagggggcttgcccccgattgcggtgtgtctgctgtccatctgttgcctgacagtccgccatcgggggcaagccccctcccacagtagattgcagtgaatttgagttaatctgagcccccttgcccctgccgagcgttccatgtccgacttgctcgaccgttacccgctgaccgcgggcacttatcacgaactgctggacgacagcggcgcagtgcgtgcccattggcagcgcctgctcgaccacctgcaacgcagcacgcccgcacaactggcccagcgccaggcgctgctgacccggcagatccaggaaaacggcgtgacctacaatgtctacgccgaccccaagggcgccgaccgcccctgggaattggacctgctgccccatgtgctggccgccgatgaatggcagcacctgtccgccggtatcgcccagcgtgcacgcttgctcaatgccgtgcttgccgacctgtacggtccgcaacgcctgatcaaggaaggcttgctgccggccgagttggtgttcgggcataacaatttcctgtggccgtgccagggtatccagccgccggacggtgcctttttgcacctgtacgccgtggaccttgcgcgcacgccggatggccgctggtgggtcaccgccgaccggacccaggcgccgtctggcgccggttacgcgttggaaaaccgcaccatcgtgtcccgtgcctttccggatctgtaccgcgacttgcaggtgcagcacctcaccggtttcttccgcactttgcaggaaaccctggcccgccaggcgccgggtgacgaccagccgccgctgatcgtgctgctcaccccgggccggttcaacgaaagctatttcgagcacctctacctcgcccgccaactcggctacccgctggtggaaggtggcgacctcaccgtgcgtgacagcacggtgttcctgaaaaccctcagtgggctgcgccgggtgcacgcgatcatgcgccgcctggatgatgacttctgcgacccgctggaactgcgcaccgactcggccctcggtgtgcccggcctgctcgatgcggtacggcaaggcaacgtgctggtggccaatgccctgggcagcggtgtgctggaatcccccggcttgctgggcttcctgccgaagatcaacgagttcctgtttggcgaagcactgatcctgccgtccatcgccacctggtggtgcggtgaagcgccggtactggccgaggcgctggagaaactgccggagctgctgatcaagcctgcgtttccgtcgcagagtttcaccccggtatttggccgcgacctggacgacgcacagcgccaggccctggccgagcgcatgcgtgcgcggccctacgcgtacgtcgcccaggagctggcgcagctgtcccaggcgccggtgtggcacaccgtcgatgaccacctgcaacaccgtgccatcggcatgcgggtgtacgccgtggccagcgatgagggctatcgcgtgttgcccggcggcctgacacgagtggccgccgaagccgatgccgaagtggtgtcgatgcaacgcggtggtgccagtaaagacacctgggtgctcggcgagcgcgcttccggtggtgaacattggcgtgcacagcgcgcaatcggcgcccatgacctggtgcgccgcgatccttacctgccgtcccgtgtggtggaaaacctgttctggttcggtcgttattgcgagcgctgtgatgacagtgcgcgctggctgcgcatcgtgctggcgcgttatgtggacggtgacgatccgctggccttgcaggctgccgtcgagctgggcgagaacctgcgtttgctgccggaagagggcgagttgccggaacgcctgctggcggcgttgctcggtgacgactggccctcaagcctgcgcgccaacctgcaacgcttgcagtgggcggcgtcccaggtgcgcggcaagctgtcccgggagaactggcaggccctggtggagctgcaacgtgaagccctggagctggaaagcgagtcaccggattttggcgagttgctggactttctcaaccgcctggtaatgtccctggcggcgctgtccgggttcgccctggacgacatgacccgcgacgaaggctggcgcttcctgatgatgggccggcgcatcgagcgcctgcaattcctcagcagcagcctggcggcattcctgcgcggtgtggccgtgttcgatcaggccgggttggagtggttgttggaattgggcaacagcagcatcacctatcgctcgcgctacctggcggtgccgcagttgatcccggtgcttgatttgttgctgctggatgaacagaacccccatgcggtgctgttccagctcaaactggtgagccgcaccctgcgccgtctcaacgatgactttggcgtgccgcgtgaaaccggccttggcccgttggtggagcgcctggcgcgcttcgacctgggctgcctggagaacccgctgttcggcgaatccagcgtgcgtgccgcgctggacggcctggccgacctgctgcaagcggtggccgatgagagtgggcaagtgtcggatcgcctggccttgcgccattttgcccatgtggatgatgtcagccagcaaacggtgtcggtgtgatgagtgcgcgctaccagattttccacgatacccattaccactacgacagcccggtgtcactggcccagcagctggcgcacctgtggccacggccgtgcgcctggcagcgctgcagctcgcagcaactggatatcagcccgcagccgtcgtcgcgccgcgatgagctggacgtgttcggcaacccgatcacccgcctggcattcgagcggccccatgacgaactgctggtcaatgccgggctgaccgtggaagtgctggcgcggccggtgctggatttccagcaatcgccggcctgggaccagacccgcgaccgcctgacttacagcagccagccgatgccaggcgagttgatcgaagcctgccgctatcgtttcgaatcgccctacgtgcacctgaagaaaaccttcgtccagttctccgaaagctgtttcccgcctggcgcgcctttgctgctgggcgtgcaggcgttgatggaaaaaatcttcagcgaattcaccttcgatgccgaagccacccaggtcgccacgccgctggtggaagtgctggagcgccgtcgcggcgtgtgccaggacttcgcccacctgatgctcgcctgcctgcgctcccgcggcctggcagcgcgctatatcagcggctatctgctgacccagccaccgcccggccagccacggctgatcggcgccgatgcgtcccatgcgtgggtctcggtgtattgcccggtttcaggctgggtggactttgatccgacgaacaatgtgcagccggcactggagcacatcaccctggcctggggccgggacttttccgatgtgtcgccgttgcggggggtgattctggggggagggagccatgacccggaggtgcgggtgacggtgatgccgctggaatgatggttgattgtgccgagccggagcagccggctcagcacaaaggaaattattcagccggatcttttggtgtttcgctctcgtcgctcgttacttcagcatctgcatccgggttcagtgcgccggcctcttcgtctgcagcggctttcttgcgttgcagtttttcctctttcttctgttccttggccaagtctctctgacgtttggcgaaggagtaattaggtttggccatgggcgatcctctagggtcgaaggtgagggtggcggcgcgcagctgccttgggctgccatggtagcagcttagcaccgcgcttggccttcacttaccgcaggcgtaggcggccagcaggccgttgaacagttgattgaggtgcatggctcgggctccagtgggtgatgggccgatcataatcagcgtgcggcactttggctggttgattgtgtcgataagtctgatagcctaaagttgtatacaatctgttgattcaggtcataagaatttctgcctgcttcaggcacccttgtcgcattacgcgttttttaaaccctgccttggagattcacatgtttgccaaactcgttgctgtttccctgctgactctggcgagcggccagttgcttgctgcagagtgcaaggtcactgtcgactccaccgaccaaatgtccttcaacaccaaagccatcgaaatcgacaagagctgcaagacattcaccgtcgagctgacgcactctggcaacctgccgaaaaacgtcatgggccataactgggtgctgaccagcgccgccgacatgcagccggttgccactgacggcatggccgccggtatcgacaagaactacctgaaagacggcgacacccgcatcatcgcccacaccaaaatcatcggtgccggcgagaaagactcggtgaccttcgacgtgtcgaagctggccgccgggactgactacgcgttcttctgctcgttcccaggccacatctcgatgatgaaaggcactgtgaccgtcaagtaacaccgcatcatcgttcatcgggggcaagccccctcccacattcaaccgcattctcatgttggaactcggtcaactgtgggagggggcttgcccccgatggcgtcttgacaatcaacacgaaactttcggcttcaccttatggcgcaaacggcatgacccgcttgtgctccgtcttgcgatacgtctcgcagataatcctgaacgcttcctcacgtaccggctcgccgtgcaggaacgcatcgatctccgcgtaggtcacgccatgtgacgcttcgtccggcttgcccggcgacaggtcttccaggtccgcagtaggcactttttccaccagcgactccggcgccccaaagtgccgcgcaatcgcacgcacctggttcttcaccagcccgctcaacggtgccaggtcgcacgcgccgtcaccgaacttggtgaaaaagcccatcaccgcttccgccgcatggtcggtgccgatcaccaggccaccggctgcgccggcgatggtgtactgcgccaccatgcgcatgcgcgccttggtattgcccagcacgaaatcgcgggacaccgccgccttgccttcaaatgccgcgacctcactggccagggctttgaccgccgggccaatgttcacggtgtggcgctcgtccggctcgataaagtccaccgaggccgtggcgtcgatttcgtcgaactgggtttcgtaaggcaggcgcacggcgataaagcggtaagcctcatcacccgtgctttcacgcagttccttcattgcacgttgggccaagaggccggcggtcagggagtcgacgccaccgctgatgcccagcaccagcgccttgagcccggacttgcgcaggcaatcctggataaacgccacgcggcgggcaacctcggcctcaagggcggcctggtcgttgaacggcgcttggaccttgagctgctgcgcaatctcacgctgtacggcttgcatgattcactccttgcttggtagggcaggtactttgaaaacgtgacgcaaataggcgacgaaattcgggtcggtgcagtgggtcttgcccgcttcatcggagatctttgcgacgggctggccattgcaggccgtcattttaagtacgatgctcatcggctcgacacccggaatgtcacaggtcaggttggtgccgatgccaaagctcacattgatccgaccacgcagcgcgcggaatatttccagggccttgggcagcgagaggctgtcggagaacaccagggttttgctcatcggttcgatgccgagcttgtggtagtgggcgatggctttttccgcccactgcaccgggtcaccggagtcatggcgcaggccgtcgaacagcttggcgaagtacaagtcgaagtcgccgaggaacgcgtcggtggtgatgcagtcggtcagcgcaatgcccagcaggccacggtattcgcggacccagcagtccagcgcggcgatctggctgtcgatcaggcgtgggccgagttgctggtgggccatgatccattcgtgggccatggtgcccagcggcttcatgtcgaactcgcgggccaggtgtacgttgctggtgccgacaaagcgcccggggaagtcatgcttgagcacgctgaccacttcttcctgcacgcggtacgagaagcgccggcgcgtgccgaagtcggccacttgcagctcggacagctcgtcgctgctggcgttggcggtcagccagtcgaacttgcggtacagctgttcgcgggcctgttcgaggatcaccgtctggtagcgatagcgattacgcacttcgctgacgatggccagcatcggcacttcaaacagaatcacatgcagccacggcccgcgcaggcggatgaacagctcgccgttctcgatgccagtctgcacgtagcgcagattgaagcggaacagcccaaggaaacgcaaaaagtccggcttcatgaagctgatacgctccaggaagcccagttgatcggggctcaggctcaattcggcgaggcgttcgatctggtagcggatctccgccaggtacgggcgcaggtcttcgctgttacggcaacggaactcccattcaacttccacattggggtagttgtgcagcaccgcctgcatcatggtcagcttgtagaagtcggtgtcgagcaagttctgcacgatgcgatcggcaaacacactctcgctcataacgggaatctccagacgggacggcgatgggcgccgacctttacgcacaattaagaaaggggactagtggcgcatagacgtgggtcggtttgccagtgttttttcagtcggcatctagctgctccatcatccacttcacaaaatcacgcacttttggcacctccgccgaatgctccgggtaggccaggtaataggcgtcctggctcggcatcgcatgttgccaggggatcaccagtttgccctcggccagttcctctgccaccaggaagcgcggcagcaaggctacgccgcagcccacctgcgccgcccgaatgcacatatagaaggtatcgaaacgtggcccgtggtagctgtgttcggtctggtaaccctggctggcgaaccagtcatgccagccctgggggcgcgaggcgttttgcagcagcaccaggtcgctgagttgcgtggggtcggtgaagggccgcgccggcaggctttccggtgcgcacaccggcaccagttcttcgctgaacagcttcaggctctcggtgccagggcgtgaaccctggccgaaatagaaggccatgtcggccttgccttgcagcagctcgtccggctcctgctcgttgcacaggtccaggtggatctgcgggtgacgcagccgccagcccttgaggcgcggcaccagccagcgcgcgccgaaggtgtagggcgtggacacgcgcagtacttcggtctcgccgccgtaggaacgcaggtagtgggtggacatctccacctgggtgaggatcttgcgcacttccaccaggtacaggtcgcctgccggagtcatctgcaaacggcggcgcacccggcgaaacagcaggtgttgcagcaattcttccaactgcgccacctgtttgctcacggcgctctgggtgagattcagctcctcggcggcgcgggtaaagctcaggtggcgggtggcggcttcgaagcactgtaaggcggtgatcgagggcaaatgtcttttgttcagcacggcgtgcctctttttatgctttgcatgaataaacggaatgatatctcgcctaatcgtcgtttgttggcaagtcttgggccagctacaaataaggcctggatcgccgtgtgtgtgacggtgcgaattttctgtttgaaattgaaggagtgacccatggttgccgcattgcttgatcgtctcggggtaaacccggcgttgtaccagtcgggtaaacaacctgtgcattcgccgatcgatggcagccgtatcggcagtgtgcactgggaaggcgccgccgaggtggagcaacaggtcagtcgcgccgagcatgcattcgaagcctggcgcaaagtgcccgcgccgcgccgtggcgaactggtgcgccaatttggcgatgtgttgcgtgaatacaaggccgacctgggcgagctggtgtcctgggaagccggcaagatcacccaggaaggcctgggcgaagtgcaggaaatgatcgacatctgcgacttcgccgtcggcctgtcgcgccaattgtacggcttgaccatcgcctccgagcgcccgggccaccatatgcgtgaaacctggcacccgctgggcgtggtcggcgtgatcagtgccttcaacttcccggtggcggtgtgggcgtggaacaccgccctggcgctggtatgcggcaacgcggtgatctggaaaccgtcggaaaagaccccgctcaccgccctggcctgccaagcgttgttcgagcgtgtactgaaaaaattcgacggtgccccggagtacctgagccaggtgatcatcggcggccgcgacgccggtgccgcgctggtggacgacccgcgcgtcgccctgatcagcgccaccggcagcacccgcatgggccgcgaagtggcgccgaaagtcgccgcacggttcgcccgcagcatcctggagctgggcggcaacaacgcgatgatcctcggcccaagcgccgacctggacatggccgtgcgcgccatcctgttcagcgccgttggcactgccggtcagcgctgcaccaccttgcgtcggctgatcgcccatgaatcggtcaaggaagaaatcgtcacccgcctcaaggcggcctattccaaggtgcgcatcggccacccgctggaaggcaacctgatcggcccgctgatcgacaagcacggcttcgacaacatgcaggacgcgctggaacaggccctgagcgaaggcggcaaggtgttcggcggcaagcgccaactggaagacacattcccgaatgcctactacgtgtcgccggcgattgtggaaatgcccgagcaaagcgatgtggtgtgcaccgagaccttcgcgccgattctctacgtggtcggctacaccgacttcgccgaggccctgcgcctgaacaacgccgtgccccaaggtttgtcgtcgtgcatcttcaccaccgacgtgcgtgaagccgagcagttcatgtcggcggtgggcagcgactgcggtatcgccaacgtcaacatcggcccgagcggcgcggaaatcggcggcgcgttcggtggggagaaagagaccggtggcgggcgtgagtcgggttcggatgcgtggcgcgggtacatgcgtcggcagaccaatactgtcaattactcgcttgagctgccattggcacaaggcattacattcgactgattctgctggctggaatgagatcaaaatgtgggagggggcttgcccccgatagcggtggatcagctgtacatctgtgggctgacacatcgcgatcgggggcaagcccccgcccacatttgaccgagctgtttgttaggtttcatcacggagtctggcaatgccattacgcgaaacatgtttatgggaacacctcacccccagccgtccggatcgcgctgcgctcaacggcgaggtcaaggtggacgtgtgtgtgatcggcgccgggatcaccggtctgtcggcggccattcatttgctggaacagggtaaaagcgtggccgtgctggaggcgcatcgcactggccatggcggttcggggcgcaacgtggggctggtcaacgccgggatgtggattccgccggacgagatcgaagccggtttcggcgaggcggtgggcagccagctcaaccgcatgctgggcgcggcaccgtcgctggtgttcagcctgatcgacaaatacaacatcgattgccagttgcgccgtgagggcaccttgcacatggcgcacaacgcccgtggcgaggcggacctgcgcagtcgtgaagaacagtggaagcgccgtggcgcaccggtggaactgctcaccggccaggcctgcgagcaggccacgggtactaaaaaaatcgccgccgccttgctggaccggcgtgccggcactctgaacccgatggcctacaccagtggcctggccagtgctgccgccgggctgggcgggcagttgttcgatcattcgccggtcactcaacttgagcgccaaggtgcgcagtggtcggtgcagaccgcccagggctcagtgcaggctgcacaggtggtcatcgcctccaacgcctacacagaaggtgagtggactgaactgcggcgcaattttttccccggttattactaccaggtcgcatctgccccgctgacggacgccgccgccgaacagattttgcccggcggccagggctcctgggatacacgccaggtcttgagcagcatccgccgcgacgccgacggccgcctgttgctcggcagcctgggcaacggcaaccagaaacccacctggttcctcaaggcgtgggccgatcgggtgcagcagcattacttcccgcacctcaaatcggtgcagtgggaatacacctggaccggctgcatcgcctttaccccggaccatttgatgcgcctgttcgagcccgccccgggcattgtggccgtaacgggctataacggccgtggcgtgaccactggcagtgtggtcggcaaggcgtttgccgactatttgtgtcaccagaatccccaggccttgccgattccctttgcgccgatgcaaccgttgtcggcagtcgggttacgcagctgtctttatgaggcgggtttctcgctgtatcacgccggccaatgcctgaggatcgtgatctgatcagcgaaataccgctcaaaagcctgcattttcttagcaggctactaatctgtattggtgcaagtcgtagcagtcgcgcactgtaaatgtgcagttccgttacgccggctgttacagctgtaggaactgtcgtttataggtttggttgcaggtgcgacctgccgaggttgtactttttcgatccattggttgcacctctggacgctagagggttgcacgtactggcgaacggagccgaaacgcctgcaataacaatgacaccgtgtctttttgaagaataaaaacctaatggcacgcgctttgctctgggctttcagtgaaaagtttgaacgcaagttgtcgtgccaaaaatcaaaaatatcggagcaccactcatgtcccagacgttttacaagaaaggttttctggccctcgccgttgcagcggcgctgggtgtttctacgtttgttcaagctgatgtgaagattggcgtggcgggcccgatgacgggtgccaacgctgctttcggtgagcagtacatgaaaggtgcccaggcggcagccgatgtgatcaacaaggccggtggcatcaacggcgagaaaatcgtgctggtggccggcgacgacgcctgcgaacccaagcaggctgtagccgtggccaaccgcctggcggaccaggacaaagtgatcggcgtggtcgggcacttctgctcctccaacaccatcccggcgtccgaggtgtatgacgaagccggcatcatcgcaatcaccccaggctccaccaacccacaggtgaccgaacgcggcctgggcgccatgttccggatgtgcgggcgtgacgaccagcaaggcatcgtggccggcgactacatcgtcgatgtgctcaagggcaagaaagtcgcggtcatcaacgacaaggacacctacggcaaaggcttggccgacgccaccgctgcccagttgaccaagcgcggcgtcaagccggtgctggaagaaggcctgacccgtggcgagaaagacttcagcgccctggtcaccaagatccgctccaccggtgccgacgtcgtgtacttcggcggcctgcacccggaagccggcccactggttcgccagatccgtgaagcgggtctgaaagacgtgaagttcatgtccgatgacggcgtggtcaccgacgaactggttgccaccgctggcggtaagcaatatgtcgacggcgtgtacatgaccttcggcgccgacccgcgcctgctgccggacagcaaggcggtggtggaagagttccgcaagaacggcaccgagcctgaaggctataccctgtacgcctacgcgtcgctccaggccctggccgccggcttcaacggcgccaagtccaacaagggcgaagacgctgccaagtggctcaaggctcacccggtgaaaaccgtcatgggcgagaaagcctgggattccaagggcgacctgaaaatctccgactacgtggtttaccagtgggataaagacggcaaataccatcagttggaaaagcagaagtaagactgagcgccgccgttccaatgtgggagggggcttgccctcgatagcgcagtgtcagccaacgcatgcatgactgacgcaccgcaatcgggggcaagccccctcccacagggggagtggtgttgttattgaaatctgttttttcctccagaagcgccgcacacctcccggtgtgcaggtgctcaccgcgtgagattgcgttatggatggtattttcctgcagcaactggtcaacggcctgaccctcgggtcggtctatggcctgatcgccatcggctacacaatggtctatggcatcattggcatgatcaacttcgcccacggcgaggtttatatgatttccgcttacctcgcggcgatcagtctggcactgctggcttacttcggcatcgaatccttcccgctgctcattctcggcaccttgatcttcaccgtggtcgtcaccggcgtgtacggttgggtcatcgagcgtgtcgcctacaaaccgttgcgcaactccacccgactggcaccgctgatcagcgccatcggtatctccctgatcctgcagaactacgcgcagatcgcccagggcgcgaagcaacaaggcattcccaccctgctggcaggcgcctggcgcgtcgatttcggcacagggttcgtccagctcacctacaccaaggtcttcatcctcgtggcggcgttcgccggcatggggttgctcacctacgtgatcaagtacaccaagctcggccgcatgtgccgcgccacccagcaagaccgcaagatggcctcgatcctcggcatcaacaccgaccgggtgatctcctatgtgttcgtcatcggcgccgccatggcggcattggccggcgtgctcatcaccctcaactacggcaccttcgacttctatgccggcttcatcatcggcatcaaggcgttcaccgcggcggtactcggcggcatcggctccctgcctggggcgatgttgggcgggatcatcctcggtatctccgagtcgctgttctcggggttgatcaactctgactacaaagacgtgttcagtttctccctgctggtggtgattctgattttccgtccccagggcctgcttggtcgcccactcgtggcgaaggtgtaaacatgtctgctgccaaatcaatcgatatcaagaaaagtgtggtcgatacgatccttgccgggctgatttcgctgatcgtgttcggtccgatcgtcggcgtggtactcgacggctacagcttcaacctggaaccggcccgcgtcggcctgctggtggccatcgtgatggtcggccgctttgccatgagcctgttcctgcaaacccccaagggcctgaagattttgcagggcttcgagagcagcggctccggcgtgcatgtgctggcgccggactacaagtcgcggctgcgctggatcatcccggcactgatcgtgatcgccatcgtgttcccgatcttcgccaacaagtacctgctcaccgtagtgatcctcggcctgatctacgtgttgctcggcctgggcctcaacatcgtggtaggtctggccggcttgctcgacctgggttacgtggcgttctacgccatcggcgcctacggcctggcactgggttatcaatacctgggcctgggcttctggaccgtgctgccattggcggccatcgcggcggcgctggcggggtgcatactcgggttcccggtgttgcgaatgcacggtgactaccttgccatcgtgaccctgggctttggtgagatcatccggttggtgctcaataactggctgtcgtttaccggtgggccgaatggcatgccggtgccttcaccgaccttcctcggcctggagttcggcaaacgggcgaaggatggcggggttccgttccatgagttcttcggcatcgactacaaccccaacatcaaattcctgttcatctacatcgtgctgttcctggtggtgctggccgtgctgtatatcaagcatcgcctgacccgcatgccggtcggccgcgcctgggaagccctgcgcgaagatgaaattgcctgccgttccatgggcctgaaccatgtgctggtcaagctctcggcgttcactatcggtgcatcgacggccggtctggccggggtgttctttgccagttaccagggcttcgtcaacccctcgtcgttcaccttcttcgagtcggcgctgatcctggccatcgtggtgttgggcggcatgggctcgacggtgggcgtggtgattgcggcgtttgtgctgaccgtcgcacctgagttgctgcgcagcttctccgaataccgcgtgctgctgtttggcgtgttgatggtggtgatgatgatctggcgaccgcgaggtctgatccgcatcagccgtaccggtgtgacaccacgcaagggggtagcgccatgagcaaggaagtcgtcctctccgtggaacacctgatgatgcacttcggtggcatcaaggccttgagcgatgtgagcctcaaggtcgaacgcaactcgatcttcgccctgatcggccccaacggcgccggcaagaccacggtgttcaactgcctcaccggcttctacaaagccagcggcggcaagatcgaactgaacatccgcggcaagcagaccaacgtgatccagttgctcggcgagcgcttccagccgaccgacttcgtgtcaccgaaaagcttcttcagccgtatgtactacaagatgttcggcggcacccatctggtcaaccgtgccggtctggcccggacgttccagaacatccgcctgttcaaggaaatgtcggtactggaaaacctgctggtggcccagcacatgtgggtcaaccgcaacatgctggcgggcatcctcaacactaagggctaccgcaaggccgaaagcgacgccctcgaccacgccttctactggctggaagtggtggacctggtggactgcgccaaccgcctggccggtgaactctcctacggccagcagcgccgcctggaaatcgcccgcgccatgtgcacccggccgcagatcatctgcctggatgaacccgctgcgggcctcaacccccaggaaaccgaagccctcagcgcgatgattcgcctgttgcgcgacgaacacgacctcacggtggtgctgatcgaacacgacatggggatggtgatgagtatttccgaccacatcgtggtgctcgaccacggcaacgtgatcgccgagggcgggccggacgcgattcgcaacgacccgaaagtgattgccgcctacctgggcgctgacgaagaggagctggtatgagcgcacctatcctcgaaatgaaggacctggatgtgtattacggcccgatccaggccctgaagaaagtctcgctgcacatcaacgaaggtgaaaccgtcagcctgatcggctccaacggcgcgggcaagtccacgctgctgatgtcgatcttcggccagccacgggccgagtcgggggagatcctctacaacggcgtcgacattacccacaagtcgtcccactacatcgcctccaacggcattgcgcagtcgccggaagggcggcgggtgttccctgacatgaccgtcgaggaaaacctgctgatgggcaccatcccgattggcgacaagtacgctcaggaggacatgcagcgcatgttcgagctgttcccacggctcaaggaacggcgtacccagcgtgccatgaccatgtccggtggcgaacagcagatgctcgccattgcgcgggcactgatgagtcgtccgaagttgttgctgctggacgagccgagcctgggcctggcgccgattgtggtgaagcagatcttctcgaccctgcgcgagctggcggccaccgggatgactattttcctggtggagcagaacgccaaccatgcgctgcgcttgtcggaccgcgcatacgtgatggtcaacggcgagatccgcctgaccggcactggcaaggagctgctggtcaacgaggaagtgcgcaacgcctacctcggcgggcactgatctaaataacgacgcggtccccctgtgggagggggcttgccccctcccacattaagccgatccacatgtatttttgtggtgtgaatagggttgccgccaaattgtggaaaacaaatccagccctcctccaaagcgcgacatatagccgccgcaaatccctgttttgtcacagttttgacttgtccccatccgctgtggaaccggctgtgggtaacgtgggagtagctggctgaaagccaacaaacacgcggcctgtagcgcggtgattgttttttgatcagcgggtttttgggtaccgcccgagcccgttgtcaacctgtttaaagacacaggtatatgactggaatatgtcccggcagcctgtggataagtctgtgactaaactctggaaagaccgccgcagaggccggaatgactggcctggagccatcgttctggtttgccgttcgtagaagggcctacatacgcaccggccaaggtcaagcaaaaaactttctaaaaccgcctgcaacccttgtgtatagaggcctgaggcattttgcacttgcccccaaagactgtgggcgcagttgtggataacctgcgcgcatatggctgtaagccacggtctataaggctttgctttaagtggttaaaaagtgatcaggcatgtgttaacttgcgtgcccagtagttgccgacatcgcggcgtacgggcattctgctggctgtttttttcccgatgcccgcaaggagaacaccatgtccgacacgctgtttattagtggcgcaacctcaggtttcggcgaagcctgcgcccgtcgttttgccgaagccggctggaaactggtgctcaccggtcgtcgcgccgaccgcctgaatgcattggtcgaagagctttccaagcagaccgaagtgcatggcctggtcgtagacgtgcgtgaccgcaagggcatggaagacgccatcgccaacctgccgccctcgttcgccacattgcgcgggctgatcaacaacgccggcctggcggtgggtaccgaccctgcacccaagtgcaatctcgacgattgggaaaccatggtcgacaccaacatcaagggcctgctcaccaccaccagcctgctgctgccgcgcctgatcgcccatggccgtggcgccggcatcatcaacctcggctccatcgccggcagctacccgtacccgggcagccatgtgtacggcggctccaaggcgttcgtgaagcaattctcgctgaacctgcgttgcgacctgcagggcaccggcgtgcgcgtcaccaacatcgagccgggcctgtgcgagagcgagttctcgctggtgcgttttggcggtgaccaggcgcggtatgacgcgacttatgcgggggccgagccgatccagccgcaggacattgcagataccatcttctgggtgatgaacacaccggcacatgtgaacatcaaccgcttggagctgatgcccgtgagccagacctgggctgggtttgcgattgagcgtggggccaagtaaggctttaaaccgcttcgctgccatcgggggcaagccccctcccacacttgaccgagttcagcatgtgaatgcggtcgaaggtgggagggggcttgcccccgatggcgtcagatcggccaaaacaggccataaggtacactcacctcctgaaaacccctccgcactctgcggattcaaggtttttgacgggaggaaatgtgagtaaccgaggtgagcaggcactgctcaaacaatcgaccatcctgatgttcgccgtggcgatcgccgggattgtcacgggtgtggtatccggcgcccagtccattctgttcgacggctttttctcgctgatcgccaccgccatcaaggtgctgatgctgatcacggccaagctgatcgccaagaaaagcaacgagcgcttccagtttggctactggcacctggagcccatggtgctgctgatcgaaggcagcttcctgttgttgatcgccatctacgcgttcctcaacggcgtgttcggcattatcaatggcgggcgcgagatcgagttggggctggtgatcatctatgcggcggtgtttaccgtcgtcgagttcggctatttcttctacgtgcgctaccgcaatcgcacgctgagatcatcgctgatccagttcgacaacatcagttggctggtggacgcgatgctctcggtgggcctgctgatcagctttctggcggccctgctgctcaagtcccagggctatggcgaatgggcggtgtatgtcgacccgttgatcctgatcctgctggccctgagcatgctggcgccggcgttcaagattttgcgcccggcgttgcgtgaggtgctggggattgcgccggaccacctggacgacaaggtgcgcgaggtcatggacgcggcacaggccaaacatggtttcgacgactacgtgtcctacgtgcaaaagcacgggcgcgcacggtttatcgagattcatgtggtgttgccggcggattacccggtggacaacgtcgcgaccctggatgggttgcgcgaagagatatccacagggctcggcacgccggatgcggcgcgctggttgacgatcagctttaccggagatcgcaagtggattgcataaggccctggtaacaggtcgccaagtgatacggcgtggtcgacggcatatcccgtcggctcaccgcgcccttggcatccaggcattcatgccagcctttggcatgcaaaaagtgctgttgcagcgccagcaactggcgctgtaaccgcgcttcgctgtcgggccgcaaggtcagtgcccgcaggtactcggcctgggcccagatgcgctgggtgctgtcacgcactgtgccatccagcgccaacatgccgctgacggcgccactctcgttatccacacccttgagttcggcgtaggcgaaggcccgtgtcagggaggcatgcaacggcgtaccgcgcagtacttcggacgactccagcaagaagaaccactcgaactggtgccctggctcgaaccagttatccacagcacccagcggtttttccatcatcacgccgtgctggcggtcgatgaagcgctgctgcatggcgttggccaggtccagcagggcgtcctgcgtgatggcgtcgtcgcgcacggccagggtggcgaggaagccttcggcgaggtgcatcagcgggttttgcagggggccggacttgacggatgaccagttgcgttccagcaccgcttcgtacaggccgtcgcctgtggaaaaccgttcggcgaccactgccagggcggcattgagcacagattccaccagcggctcacgcaccttggcccagtaatgggcgcaggcgaagatgatgaacgcgtgggtgtacaggtctttgcgcttgtccagcggtcggccggcggggtcgatgctgtagaaccagccgccatgttcggcgtcgtggaagtgccgttgcagcgagcggaacaacgccgccgcacgttcttcggcaaaggccgcatcgggtccgccgatcaggctggcgaacaggtacaactgccgggcgcaggccatggcgcggtagcgttgcgggggtaatggccggtggtcggcgtccagcgcctcgtagggcaatgccaggtcggcattccagccggggccttgccagagcggcacgatcaggctgtggaagtgcgtgagcacggtgttcaaggagggttgggaagcgctgggcattggctggcgtcgtcacggcaggggtgtaggcgcgcatggtagcaggcttgggttctgtggtgtctggtctagcgctatcgggggcaagccccctcccacaaggtgggagggggcttgcccccgatgaggccgtcaaatacgccgcaaatcagcctgccaacaaccagaccccggtcgccgccgaagccgcccccgcaacccgcaccaacggcgccgccgccgccggcaggaagcgcaccaccgcgtaaccggcagcatgcagcactgcggtcgcagcaacaaaacctgccgcgtacgcccacgggctggacatgtccggcagctccaaaccatgggccacgccatggaacagtgcgaacaaggctgtcgcgccgaccgccacgaacaacggcggacgcaccgccagcgcgactgccaggcccagggccagcaccgacgcggcaatcccgctttccagcgccggcaacgccaggccttcaaaccccagcacgccgccgatcagcatggtgcccacgaaggtgcacggcagtgcccagcgcgcggcgcctttttgttgggcggcccacaagccgacggcgaccatggccaacaagtgatcgataccgctcaggggatggctgatgccggccaccaggccgttgtcgccgtggcccgggtgggcgaaggccagggcaggggccagcagcagggcggcggcggtcagcagtttcttgaggttcatggacaggttccttatgggttgatcaggcggcggtcagcaggccttggcgttcgatgaaggcgacgatgtcatccaggccgacgccggttttctggttgctgaacacaaagggtttaccgttgcgcatgcgggtggtgtcgctgttcatcagctccagcgaggcgccgaccagtggggccaggtcgatcttgttgatcaccagcaggtcggacttgcagatgcccgggccgcccttgcgcggcagcttgtcgccggcggacacatcgatcacgtagatggtcaggtccgacagttccgggctgaaggtcgccgacaggttgtcgccgccggattccaccaggatcaggtccaggccggggaagcggcggttgagctggtccacggcctccaggttgatcgaggcgtcttcgcggatcgccgtatgcgggcagccgccggtttccacgccgatgatgcgttccggcgccagggcctggttgcgcaccaggaagtcggcgtcttcgcgggtgtagatgtcgttggtgaccaccgctaggttgtagcgatcgcgcagcgccaggcacaaggccagggtcagggcggtcttgccggagcccaccgggccgccgatgccgacgcgtagaggttgtgcgttcatgtgtgttgtctcctaggaacggaacaggcggctgtattggcgctcgtgggccatgcacgccagggacaggccaaaggcggcgctgccgagttgatcagggtcgatgcggctggcgtcctgctgggcgtgttgcaacagcggcagcagttcgctggtcaggcgttgggcggcttgctggccgagcggcagggttttcatgagcaccgccaattggttttccagccagctccacagccacgcggcgagggcgtcggcggggctgatattccaggcgcgggcggccagggcccagcccagggcgaggtgaggttcggtgcactgttgaagaaaggtgcgggccgcgtcgtccaactcgggcaggccattgagcagttgttgcagggagtagcccatctgccggctttcctgatacagctcgcgggtttcacggctggcgcggtgttcttcacccaactgcgccagtcgcgaccaatctgcctccagggcggcctggcaatgggcgagcagcaacggtgcctcgaaacgcgcgaggttgagcagcaactggtcgctgatccagcggcgcgcagtggccgcatcgttgacgcggccgttctcgacggccatttccaggccttgtgaatagctgtagccgccaatcggcaattgcggactggccagacgcagcagcgcccaggctgggttcatagacgcacgccgaactggtgcagcttgggtgggtagttgaagtcttcatcaccatggcgcgaatgatgatggccgccaccataggcaccatgctccggctggaagggcgcttcgatggtttccgtctgtgcacccaactgttcgagcatggccttgagcacgtagtcgtcgagcaggcgcaaccagccgtcacctacttgcaacgccacgtggcgattgcccaggtgataggccgcacgggtcagttcgaatgcactgctgcaggtcacgtgtaagagttgttcaggccgggcgcacacgcgtacgacgcgtccgtcttcagcctgcagaaattcaccatcgtgcagcggtggctggccgcgctccaggaaaaggccgacgtcttcaccgtcggcactgaaacagcgcaggcggcttttgctgcgggcttcgaaattcagcagcaactcggcggcccagagggcttggggggcgattcggcggtggatcaccagcatcaggcagcttccagctatgagcgatgaaacagctagagcaaggggcttgccaacctcgtcgaggcgtaggaaatgcctgtaggtatgcggggtggcgccactaaatagggcgtgaagacattgcgtgtatgcgccaagttggtgcaagagattgcctgttgcacgcggggtgggcgttttcggattttccctacatggtctgaggaatcggcgttcatcaggttacctgcgagatctttagcctgtgcgtcgtgttttatccacagcgacgttcatcatgttcaagtcactttgttatctattcattgtcagcctgacgtttgtgctttctccggcctccgccaacttgcaacaccctgcctctttctccgtttcactgaaagaggcatccatcaatgatgtgatcgaccgtgcccaccaactgctgggaacgccctacaaatggggtggcacctcggcggatcagggcttcgattgcagcagtttcctggtgtatctgttcaagacccaagccaatatccagataccccgcacgacggtcgcgatgcaccgctccacggccccgaccatcaaacgcaacgcgctcaagcccggcgatgcggtgtttttcaaggggaatgggcgcggccaggtcagccatgtgggcctttacatcggtgaggacaaatttattcattcgccgcgtaccggcaagagcatccgcatcgattcgttgagcaacagctactggaacaagaactacaccacggccaagcgcttccactcggcgggatgatggcgttactcggtgctgcccaggccttgccagtgcttcaaaccgataaagatgaagcgcagttgctgggtgattttcgcctgaggcgtgaggtggtcaggcagggcctgggccggcgggtcgatgatgtcgggcagggtggcgaacacacttttaacgatcaggtcagccatcacgtgcaaaccttcggcatccaggtgctgcagcttgggcatcagggtcaggtcggctgccaggtcgcgggtgatgtcttcgcgcaaggcgccgatcgcttggcgcaccgcgaggcagccaccgtattgttcacgggccaggaacaggaattgcgaacggttggccgagaccacatccagaaagatccgcacggaggcatcgataatgccgcccatcacgaattcgttgtggcgcaccagacggatcgtggcgcggaaggtttggcccacttcgctgaccaggacgagcccaagctggtccatatcggcaaaatggcggtagaaaccggtaggcacgatgccggctgtcttcgccacttccctcaggctcaggctgccaaacccacggccacactccatcagatggcgggctgcgtccatcaaggcgaggcgggtctgttgcttctgttcggcgcggggcagcattggcaggcgggctttgtcggcaagtacagcgacgcactctagcaaaacagcttcgctggcgtcgaacttggcggggagggcttgcgtaacagtctctacaaaaagtcaaaagcccgatcggctgatcgggcttttttctgggccaccacggggttagctctgtgcttgatgcagttcttgcagacggtcagcgccgccttcggcaataccttgggtgtaggcacgctcgttggcttgttcagcgccaccttcaaccaggcctttctgttccagacgatcacggccaccttcggcgacagcgttgcgttccagcaggcgatcagcgccaccttcaaccagacctttctgttccaggcggttgcgaccgttttcggtcaggccttcggtgtaagcgcgtttgttggcgtgttccgaaccattttcagccacagcgcctttggcgtagtcacggttttcttcttcttgcgaaccgctgcgagcgacggtctggctgaaatgagcggcgtcggctttgacttgtggggtggcctgttcggcggctggcagggcaaaagcactggaagccaggatggataacaggacggtagcgagtacttgacgtttcatgatgggttgctccttgggagggcgataaagtgggtacagggctaatgctactctcgataagtcgatataaaagttcataaacacaatggtaataatcaacagaattgattgttctaggcggaggctctagaacgggcctctcaagcacgcggttttgcaccggtgtgggtattttcgacacgcgagtgggtaacaatggtgcggtgccgtagggtaaatctgtcgaagtggtcagaaaatgaggtttttcctggcaaatcgaggattgggttaaaccccgcgacggtttgccagtcgtagtcctataagctgtccttaaaggctgtcacccagccagtcgtattcaggagtcctgtgcaatgacgcgcacgcgtaaaatcgccgcttggagctgcgccagcttcgtgctgttaatcgccatcgtggtattggtcctggtgttctttgactggaaccgcatcaaaccgcccctcaatgccaaggtctccgaagagttgcatcgaccctttgccatcaatggcaacctggcggtggtgtgggcgcgtgagcccgatgaaggcggctggcgtgcctgggtgccgtggccccatgtgattgccgaagacctgaccctgggcaaccccgactggtcgaaaaacccgcagatggtcacgctcaaaaaggtggaactgcgcatttcacccctggcgctgctggtgcagcgcgtggtgatcccgcgcatcgacctcaccgagcccggcgcgcaattgcagcgcctggccgacggtcgcgccaactggaccttcacgttcgaccccaaggaccccaacgccgagccctccaactgggtggtggacatcggtgccatcggcttcgacaaaggccacgtgaccctcgacgaccagaccctcaagacgcaactggatgtgatcatcgatccgctgggcaaacccattcccttcggcgaaatcgtaggcgacgccgatgccaagaaggcgctggaaaaaggctccgcgccacaggattacgcgttcggcctcaaggtcaaaggccagtaccacggccagaaactcgacggcagcggcaagatcggcggcctgctggccttgcaggacgcggccaagccgttccctctgcaagcccaagtcaagattgccgacaccagcatcgccctggccggcaccctcacagacccactgaatctgggcgccctcgacctgcgcctgaaactcgccggctccagcctgggcaacctgtatccgctgaccggcgtgaccctgccggattcgccggcttattccaccgatggccacctgatcgccaagctgcacgagccaaccggcgcctcgttcagctatgaaaatttcaacggcaagatcggcaacagcgacatccacggcagcctcgcctacgtcgctagccaaccacggcccaaactcagtggcacgctggtgtccaaccaactgctgatgaccgacctcgcgcccctgatcggcgccgactccaacgcccagcaaaaagcccgtggcggtgacagcaagcagcccgcgaccaaggtgctgccggtggaggagttccgcaccgagcgctggcgcgtgatggatgccgatgtggaattcaccggcaaacgcatcgtgcacagtgccgatctgccgttcaccgacctctacacccacctggtgctcaatgacggcgaactgagcctcgaacccctgcgtttcggcgtggccggcggcaagctggatgcgcagattcgcctgaatggccgtaccacgccgatggaaggccgcgccaaactcaccgcgcgcaacttcaagctcaagcaactgttcccgactttcgaaccgatgaagaccagcttcggtgaactcaatggcgatgccgatatttccgggcgcggcaactcggtggcggcattgctgggcacctccaacggtgacctgaagatgctcatcaacgacggcgcgatcagccgtggcctgatggaaatcgccgggctcaacgtgggcaactacgtggtgggtcgcctgttcggcgataaggaagtgaagatcaactgtgcggcggcgaacttcggtatcaagaccggcctggcgaccactcgcctgtttgtgttcgataccgagaacgcgatcatctatatcgatggcacggcgaatatggccacggagcagcttgatctcaccatcaccccggaatcgaaaggcttccgcctgttctcgctgcgttcaccgctgtacgtcaacgggccgttcatcaagcccaatgccggggtgaaagccattccgctggcattgcgtggtgcaggcatggtggcgctgggggtgatcgccggaccggctgccgggttgctggcattggtcgcgccgagtggcggtgaaccgaatgagtgcgcgccgttgctgcagcagatgaaggaaggcaaggcgccgaaaaccgtgaaaggctaactgcaaatgtgggagggggcttgcccccgatggcggtagaccagtcgacatctcaattgactgatccaccgctatcgggggcaagccccctcccacatggggttacaggctttctagaatatccgccatgtcgtccgcatgctcttcttcctgcgccaggatctcttcgaacaggcggcgcgtggtcgggtctttatcaccgatgtactggatgatttcgcggtagctgtccacggcgatccgctcggcgaccaggtcttcgtagaccatctccttgaggtccttgccggccacgtattgcgcgtgggagttcttcgacagcaggtccgggttgaactccggctcgccgcccaactgcacgatgcgttcggcgagtttgtcggcgtgttcagcttcctgggtggcgtgttcgaggaactcttgcgcggcgacggcggccttgatgccgctggccatgaagtaatgacgcttgtagcgcaacacgcagaccagttcggtggccagcgacgcgttgagcaggcggatgatttcttcgcggtcggcgtcatagccctcggtcacggcaccgttttcgacgttctggcgggcgcggctgcgcagggtcgcaacgtcagtcaaatttgcttcggtcatctcaatctcctggggctaatccggttttgcgccacgctctgtcggcgtgatcgctccaagttgtgagtcctggagaaagcaaaaagttttattggatttaccgatagcgtcataagcccgacttgaggctgggctaggctggatggatcggattgagaggatgcccggttcatgccgcagtcgttggccacgcgctaccccctggtgttggtacccggcatgctcggcttcgtgcgtttgggctggttcccgtactggtacggcatcgtcccggcattgcgggcgggcggggcgcaggtatttcccgtgcaagtggcgccgctggactccagcgaggtgcgtggcgagcaactgctggtgcagatcgagcgcattcgccgcgaaaccggtgccgacaaggtcaacctgatcggccacagccaaggctcgctcaccgcgcggtatgcggcggccaagcgccccgagtgggtcgcctcggtgacctccgtggcaggccccaatcatggctcggagctggcggatcatatccacctgcattaccccgctgacggcgtgaagggccggatcatgagcgcgctgtttcacctggccgcctgggtgatgggcgtgctggaaaccggctatcgcggaccgcgcttcaagacggacttgcaggcgtcccatcactccctgaccagtgccggcgtggcgttgttcaaccagcaatacccgcagggattgccgcagacctggggcgggcagggcgccgaagaggtcaacggcgtgcgctattactcatggtccggcaccttgcagccgggcatcaccgaccgtggccgtaacctgttcgacggcacgaaccgcagttgccgtttgttcgcccgcagcttcgtacgggagaagggccagtgtgatggcatggtcgggcgctacagctcacacctggggttggtgatcggcgatgactacgcgctggatcacttcgatatcgtcaaccagtccctgggcctggtgggcaagggtgcggagccgatccggctgtttgtcgagcatgcacggcgcttgaaggcggccggtgtttaacgcactggggtggtccagcgctccgacaagatcaccccgcccaaggtcagcaggccgcccaccaggtgatacagcgccagttcttccttcagcaccacggcggcgatcagcgcggtgatcaacggcagcaggttgaaaaacaacgtggtgcggctcggccccagggtcttcaccgaatgcatccaggccagcggtgccagcatcgacgccagcaggcacgcatacaacaccagcggaatattggcccagcccaggccggccttcgccgagaacaggaacagcggaaacagcaccaccaccgccaccagcacctgcagatacagcagcaccagcggcggcaggcgcagttgccatttcttcagcagggtgctgtagaccgcataggccagggtggcgaccagcatcatgccgtcacccaggttgaccccgtgttgcagcagtgcgccgaggctgccggcggacacaaccaccaccacgccggcgaatgacagcaccgcaccggtcagcgcgccgtaggtcaggcgctggccgaggctgatgatggccgccgccagcgccatcaatggcatcagtgacaggatgatgcccatgttggtcgccgtggtgagcgacgcggcgtagtaggccaggctctggtacaccgccatgcccagcacgccgaggatgaacactttgcccaggttcgggcggatctgcgcccagtgggcaatcaccggcttgagcatgaatggcgtaaacagcagtgccgccagcagccagcgatagaagccaatctccgccgggaagatcgagcccacggccagtttgttgacgacggtgttgccggcccagataaaaatggccagcaagggataagcgtattgcatcgaaaggaacccggtgtgtagatgaggcaggattatccattgtctggatcgaagcctatactgcgatccagacaacccactgctgtatccagacaacatggccaagcacaacgtacgcctccaggatttcccccaactgccgagcccggtgtattttcgctattcggatttcgcccccgacaccgagtgcacgccgcaccagcatttctggggttcgctggattactccgccagtggcgtgatgcgcatggaagtggccggcagccgcttcatgtctccgccgcagtacgccgtgtgggtgccgccgcataccgaacacagctcctacaatgccgaggcaattgtctaccactcggtggggctggccccggaactctgtgagcaattgccccggcagccgtgcaccctggccatcagcgatatcctcaaggccatcctcagtgacttcgcccagcgcgatgtgaacatgccgcagaccgagtcggacatccgcctggcccaggtgctggtggaccaactcaagcaggcgccgatccacgagtgcttcctgccctacgcccgtcaccccgggctgctcggcgtgctggaaggcatgcaggccgaccctggcgataaccggcccctggcgcactgggccgagcaggtgcacgtgagcgagcgcaccctggcgcgtcagttcgtgcgggaactgggcatgagcttcggtgaatggcgccaacgcctgcgttacctggccgccatcgaggccctcgacagcgagcgcagcgtgcaacatgtggcgtttgacctgggctacagcaccgcctcggcgtttatcgccatgttccagcgccaggcgggatgtaccccggagcagtaccggcgcgcccatattcgtagtcggtgaagatgtaacaggctttgactacactgctggataggccgtgcccttcggtgcggtaacagggagaaaactccatgaagatgctgcgaattccgctgttgatgatgggcttgctgctgtgttcccaaggctttgccgccaccgcccagcaaaacaaaatgaccacctgcaacgccgaagccaccaccaagacgctcaagggcgacgagcgcaaggcgttcatgaagacctgcctgtcagccccggcggcgaatgacgccaagaccctgacaccgcagcagcagaagatgaaggattgcaatgcgtcggcgaagaccaaggcgctggccggggatgcgcgtaaaacctttatgagcacctgcctcaaaggctgatcactctttcgcgagcgccgcagatcaacggtgggagccgggcttgcccgcgatacaggcgcctgggtctgtctggtacaccgcggcgaggccatcgcgggcaagcccggctcccacacttgatcgcattcacaaccgacccactcgcttgattccctcaaggctggcagactgcccatcctttaacgccgttcgttttgaggctgtatgccaacgttttctcagcgtcacgtgctattgctggccagctacatcatcatttttggcgggttgctgctggtgctgccgctcaaactgctgcccagcctgctggccggcctgttggtctatgaactggtcaacatgctcaccccccaactgcaacggctgatcgaaggccggcgcgcgcgctggctggcggtagcgttgctcggcacgttgatcgtcagcgtcctggcgctgatctttgccggcgccatcagcttcctgctccacgaagcggaaaaccccggggcgtccctcgacaaattcatgggcgtggtcgaccgcgcacgcggccaactgccgccgttcctcgacgcctacctgcccgccagcgccgccgagtttcgcgtggccatcggtgactggctgagcaagcatttgagcgaactgcagcttgtgggtaaggatgccgcccacatgttcgtcaccttgctgatcggcatggtgctcggcgcgatcatcgccctgcagcgcgtgcccgacctgaccaaacgcaaacccctggccgccgcgctgttcgaccgcctgcacttgctggtccaggcgtttcgcaacattgtcttcgcccagatcaagatcgccgcgctcaacaccgccttcaccgccgtgttcctcgccgtggtgctgccgctgtgtggtatccacctgccgctgaccaagaccctgatcgtgttgaccttcctgcttggcctgctgccggtgatcggcaacctgatgtccaacaccttgatcaccattgtcgcgctgtcgctgtcgatctgggtggcggtggcggcgttgggttacctgattgtgatccacaaggtcgagtacttcctcaacgcgcggatcgtgggcgggcagatcagtgccaagtcgtgggagttgctcttggcgatgctggtgtttgaggccgcgtttggcttgcccggcgtggtggcagggccgatttactacgcgtacttgaagagtgagctgaagctcgggggtatggtttaagccttgtattggccagtctggcctcatcgggggcaagccccctcccacattttgatctgtgaacacattcaaaggtgggagggggcttgcccccgatgggcgcgccgcggtgtttcagataaaactcagctgccgtagcgcttgctggcctcaatcgccaagccgctgccgatactgccaaagatgttcccttccacgtgccgcgcatttggcagcatcgccgagatgctgtggcgcagtgccggaatcccgctggaaccgccggtaaagaacaccgtgtccacctgggccacgctcaccgaggcatcgttgagcaactgcgtgacgctgttgcgtacgcgctccagcaggccatcgatggcggattcgaacaaggcgcggctcaactccacgctcaagccgggctcaacccggtccagcagcacatggcggctgtcgtcgtgggtcagttggatcttggtttcttctacttccatcgccagccagtgcccggcgcgctgttcgatcagtttgaacaggcggtcgatgccgccggtgtcttcgatgtcgtagcgcatgctgcccaacgccagctgggacttttgcgagtacaccgagttgatggtgtgccaggtggccaggttcatgtggtggctggtgggcatgtaggccccgctcttcatgcggctgccgtagccgaacaacggcatcatgccgttcagcgagagctgtttgtcgaagtcggtgccgccgatatgcacgccgccggtggcgaggatatcgctctggcggttgtcgttgtgacggcggtccggcgacaggcgcaccagcgagaagtcggacgtaccgccgccgatgtcgacgatcagcaccaattcttctttctcgatggtggactcgtagtcgaacgccgccgcaatcggctcgtactggaacgagatgtccttgaaacctatcttgcgcgccacgtcgaccagggtgttctcggcttcctggtcggccatcgggtcgtcatcgacgaagaacaccgggcggcccagtaccacttcttcgaactcacgcccggcgttggcttcggcgcggctcttgagttggccgatgaacagcgccagcaggtcggtgaacggcatcgcggtgccgagcacgctggtgtcgtgcttgatcagcttggaacccagcaggctcttgagcgagcgcatcagccggccttcgtagttttccaggtattcgtgcagggccaggcgaccgtacaccgggcggcgctcctcgaagttgaagaacaccaccgacggcaacgtgatcttgtcgtcctccagcgcgatgagcgtctcctcgccggggcggatccagccgacggtggagttggacgtgccaaagtcgatgccgcaggcacgggctggggatgggtttttcatgtctatcgggttccggttgaaaaacggccgcgcagtgtatgccagtcgaaggcggatgcgtaggccgactatccgctaaatcgcgcttgaaagttgggtatttgcccccacatctgttgcatacggcaagtgccgataacactttgacgcacccccaggccacatcactcgacaagtgcaatgcagcgcacgttgtgcccagggctgtgcgatctcgattaaggatggtgaaccgccgatggatttcaaagactattacaagatactgggcgtagagccgaccgccgacgacaaggaaatcaaggcggcctatcgcaagctcgcgcgcaaatatcaccccgacgtgagcaaggaaaaagacgccgaagccaagttcaaggacgcgtccgaagcctatgaggcgctcaagagtgccgacaagcgcgccgaatacgacgagctgcgcaaatacggccagcatggccaaccgttccagggcccgccgggctggcagagccgtggcggctttggcggcggtggtggcggtggtggcggtgaggacttctcggacttcttcagctcgatcttcggctcccgtggcgacgcttttggtggcggccagcgccggccagccgggcgcaaaggccaggacgtggagatgcagctgtcggtgttccttgaagagacgctgtccaccgagtccaagcaggtcaccttccaggtgccgcagtacgacgcgtcgggccgtcacgtgagcaacaccaccaagagcctgaacgtgaagatccccgccggcgttaccgacggcgaacgcattcgcctcaaggcccagggcgcgccgggcattggcggtggtgcgaatggcgatctgtacctgatcatcaagttcgcgccgcatccaaaattcgaagtggatggcgaaaacctgatcatcaacctgcccctggcaccgtgggagttggcgttgggtgctgaagtacaggtgccgacgctgaccggcaagatcaacctcaaggtgcctgccggcagccagaacggccaacgcatgcgcgccaagggccatggcctgctgaacaaggccgggcagcgcggcttcctgttcgtgcagctcaaggcggtaatgcctaaaggcagcattgatgaggtcaaggctctgtggcaggagctggcgcaaaaggcggcgttcaatccccgcgaaaacttctgagggcgtgaacgcctgggcgcccgttactgcgggcgggaggcgccgggttgctggtgatcgccgccgtgcggtgtcagctcggccacctcccggcgtgacagctccagcagcttgaggttacgttcggtggcctgctcgatttccagccggttcaaggcctcgaggtaggcgtcatcaaagtcttggtgtgcatcttccagggcgttctgccgtgcgtcggcattgcgcttgagggtggcgaactcgtcggcataccgctgcttgaggtagtccacccagtagtcccggctgatcaggtcctcgtaaaacacctcactgcgttccgcgtcgagaatgttgcggcgcgcgtcggccagttcagtgccagtgattggccggctgaaccgcatgtggcggggttgcccaggcagctccagctggtccggccatcccctggccagtccgatgcggtacgacaagcgcacttccgccacgtccgagtgtgggagcagcgtcctgtcggcctcgacttcggctctgcccagccggaacaactgccgggacaggttcaacagggccgcacctctcagatccagccgcgccgtatcgacgttgagcaacgcgttgtgctcgtagaccctgacttccagcccgctgaaggtcaggatgcggccatcgacgcaggtgccgtgcgtatgggacatggcgaacagcgcctggcgcagttcggtgttatcggcggccgcttccagcacgttgcgtacccgctgcgacaggtcggcgcgagccgcgccgaactccgtagtgtcctgcaaccgttcgagcaggtgaaaaaacgcctggtgatccggttcggcctgcagttgtgtccagatctcccgcagcctgccttgctcaggaaggggcaggtcgtctatccaaggcaccggttgttcaggtagtgcgggttgcgccgggagctcttcgtcgggttgttcagggaagatttcatcgggctctggtgatgacgggagcccatcgtccagcattgtctggatgtcccggcgtgacaggcccagcgccgagtcacgccccgtgcggtccagatactcgataagcgccgtcaggctgtcgtgcgacaaggggttgtcggagatatctgtaccctccatcaaggcatcgtggctgccatccagtgcttcggtcgggattgcactgatgtcattggcgctcaggttgagcgtgcgcagatgaccggcttccaatgtgccggccggccaatcggtgaggcggttaccgctcaggttcaacacctcgaggggcgagccaggctcgagactgaaaaactccatcaggttgtcgctcatgtccagacgttgcaggtttggccagtcatccaggccgatggccaactcatcgtcgaatcggttggatgacagatccagctccctcaactcaggtaattctgcgagtgccctgggcaagccctgcaactcgttgccggtcaggcgcaatgtgcgcaggttggaaaagcctgcgaggaaaccgttggagccttgttcggcgaacaggaggccgctcaggtccaggtgatgcacatgggaaaagtccgccgttaccaccggcaggttgtccagttgcaagccgttgaaactcagggtctggcccgccgggtccgacgccagcccctggcgccagcacgtgacgatgcgttgcgcggcctggttgcggcgactggccacggaccagtcggtggctggcgagcctcgcgtgtacagccagccattgagctggcgtatcagggtgtgcagggcctcattccagacgtcgatcagagcgtgcaagtgcgtgtcactggcgccgcctgcgcgcaggcgtgtcagccattgctgtaacgtctgctcatccatgccgtgctgcaaacgttgcaggcgttgcggcaggggcaggccggtgtcggcggtgggcaggtcgagcaggtggcgggccaatgaggctccgctttcggcctcggggaatacgttggtgggtggttcctcataggcaaaacgctccagggctccggcgggcaggccccgggcggtttcaacccgctgtcgggccacagccagcgcgccttcggaaacctggctcaacggcgtaccgaccacgttggtactgagcagcagctcgtctctggtcaggattgcctcgggcaacacggtgatgcgggtattgcgcaggttcagcgaggtcagttgcgccaagtcctcgagaccggtcggcacttgctgcaggttcgtttctcgcaggttcagcgtcctgagtcgtggcatgtgatcgagctcaaggcgcgtgaggggattgccttgcagcgagagatgttccagtgcgacgaagtcctggagctcggagggggcggcggccagctcgcagtagttcagttcgacagtgcgtgcctgggtgaatgcccggacgaaacgactgacctgctccatgggcacacgcaggttcatcaggcgcaaggctagggtgtgggggaagctgttggccggcaattcgggcaggcttgaggggctgaaaccgcgtagatccacttccagaaatgagcttggccgcgcgcgcagtgggtcagccgccgcgtagaggttgagcagcccgcgactccattgcacccgcaagtaaccgcccatccatcgttggtttgcgtgttccaccgcgtggggaggacgcagccactcgttcagccgccggtcgatttcactgtactgttcgctcagcgcctcaatcgcgtcaaagcgggcgcggtgaccgacccagcgttcggcgaagctgttgatcaacacctgcgagtcccgagcgggctccgtgaggcgtgccagttccccgacacagtaaatccgcaccatttcctctaggtcgatcaagtgatcgggttggttgttcagccgggtatagagcgctctgaagctgtcgcgcgacattctcgaccagtccagcgagaggccggacagcaggcgctggtgaccttccagcaattcggccggaatactctggataccggtgccgcgcaggttcaggcgctcgagctggggcaggtcctgcacgccaaccggccaatcggtcacctgagagccgactatttccaactggcgtagccgcgtcaggcggctgacatccagactgggttggtgagtcggcgcaaacacgttgttgttggcaatgctcagctcttccaactggctgagcgtgcccagggtgttgatgttttcggccgagagcggtgaaaagagctgcaatctcgtcagtcttggccagtgtgtcaatgtctcgagctggttgatgctccgcgggccggtgacgaagatatgcaggctttccacgctggggaacaagccaggcaattgctccagcggttggccgtgggtgaccaacacgcgcacatgggaaaaatccgccgtcaacggtggcaacggggcgtcggtggtgagttcaagtctagcggctgtctgcacgtcactggcgaggggcgcattgcgccaactggccctgaggttttcggctgtggtattgcgcagcatggcttccagtgaggtgggcggctgcgttgcaacccactgcgccagtgtgttttccagggttccccattcacgcccgcgtgcctgcaacagcccgtagatctgcgcgtcggtttgcccggcgcggcgttgctggaggataaagccgttggcctgctcgtcgctcaggtcggggtacaggtcttgcacgcgcgtgaccagcgacgggtccatgccggcgccacggccactggcgtagtaaccggcctgattcacgcggatgcgcgcaggcggcttgaaccgcgtcgcctcaccacggggctggcccagccactgcggcgccaggtgacggtgctcgaccgcactgcgaatgatgctgcgctgcaactcggcctgctggcccacatggggaacacccaacgcctggcgcgcttcgtcgggcagggcatgcagcaccgacgcgtaaaagttgtcgccatacctgggcaggctgttgagggcctcgccgcgctcgtcgaacgcctggtagaccgggcctttcttgaccaggaatttgcgctgcatcgcgtgctggttgccgatggcctcgatcagccggccacctacgtgttcatcgcggatttccaggcgcaccgcgtccgaccagcccggcagtttctgcaatgcgtgcagggccaggcgcttgctgtcggtggtcgcgatgtgatccgtgtgcagcccggcataggcgcgggcctggcgcccttgtcgtgcataccagcggccttcttcgagcaaggccagcggcactttgccggtgctctccaggcgctcgagggcttcggcactggcgtggaccaggatgtcttgcgctgctggcttgctcagccccggacaggctttttgcaattgtgtgatgcgcaggtcagtgggtttgggcccttcatagagactttcgaaaatcgctgatcgacgggtctgcgcaaagtcggcgatctgttttctgaactccaccggccttgcctcgcgcacccgtgccgcctcgccaccgagcaggccggtgatctcgtcctcgtccagcgccgccaggatacgccccggcagcccgctgcccagtacatccgcgcggctcatacggatgggcgccctggcgcgcacgccggcatacaagcgctcggcgccgtactgaatggatttcccccgcaggctcggaccgtcaaagacctccagcacccgacccgccggccagcggggcaactcagtgaccagcggcaggatgtacagataacgctcgtccaccgccgtgccggtctgcacctggctgatcacctcttcgacgcccctgtcggcttcaaacaggcgcatggcatccgtcaactcgggcggcggtggctggttgtccaggtggaccttgcgcagggtgttatcgctgacgccgctgacttcggcgatcttcaacaattgctcgtcggaatactgttcggtcgcgttgccgaaccggcgtagcagcgtgagccggtcccaggccagtgggcgttccagggtgtggcgccaggccccttgcccgttgtgccgcagcagcggctgataggcatccggatcactggggtgctgaatgcgccactcgccgggcggtgtaccttggcttatttcgtagtgcttaccgtcctggcggatataggttttgccgttgaccgcataacgtccctggggatcggggctggcctcgggcgccagggcaacgtcgcttgcataggcgttcaggtcgggcttccacaggcgggtttctccgttgggcaaggtgactgactgcaacccctcgatcaccggttcagccggtaccgccgtcaatttggccaggcctcttcctacccccacttgagcagcaagcaacaccaggttctccgccacatcaatcaggtgagccttggccgctttgcgatcaccttcggaccactccttcacaccttcgaaggtttcgtacaggagctggccggccatcacggcgatcatgacttcacccagcaccggtacgaatatcgacaccccggtcaacagcagcatgccgatattgagcagcgccgccaatttgcgcgaacgcacggtggcatccacttgcgcggtcggcacggcgtggctgcgggcgtcggcgtagactttggcgcggtgttgctcgtagaggtaggtccacaggtcgaagttatcgatccagaagataccgctgtgcacgggcgcgataacgacagggttcaggtacggatcgtcgttggccacctgctggatcgggttgggcggtggcagggtgttgacccggctgaacagggaaaacgggtcgagcccctggcgtatctggtccagcaagggcgcatacggggccaggtcctgggcaaccgtggtttccgaggtgtcctgggtgaattggctgaagtagtccgcgcggtcggcgtaatcgacgaactggctgaaaaaacgctggtaggcgctggggctgccggcggtggccgggggcgtgtcgcgggcggtgaagcgctctttgaacagtggcttgagctggcgcaaggtgtagcgtttgaggggcgattgcggatcgtcggggatgtacagcagcaactcgctcgcgttgtggagctctccgctgaccagaaataccaccacgcccgtgagacggtgcttcatcaaactcaagtcgcgaaaccagatgcgttggccgttcagcatcggttcggtttcgccgccgaccaccgcgagcaccatgcggtagtccgcgtcggtgatgtcttttttcagcagggcctgttcagcggcaacgcgcagggaggccttgtgggcggtgatgaatttgtcacgcactacggcctgcgtgaccgcgtctttgggctccaggtaatccttgaggtaggcctggtacttcgcgccgatgtccagtgagcggcacagcccagtgaattgcgccacggtcagtgatgtagacactgcgtcgaattcatctccggtcttgaccacgaaccccgacgaagggtgaaaggcgttggcctcacattcagcctcttcgaagttgtgcagggcggcttgcagcagaggcagcttcagggcttcgaaccaaccggccgtgatcgagaaaacgccgacggtgatggattttctgagcctcagaaaggttttatcgacatccagctgcaccttgaactgatcgttcaacgcctgggtcaacaggggccgggcaaaggtgtcgatgtcttgcatcgcggacatggccttgtccagtttgccttgcgcagtgaagcttgcggtgatggcgtcttgcagcgatttgcgttgtgctggcgaggcgtgctggtaccaatcgggcgtcgtcgcgggcgtcgttttcagggcttcacgttgctgcgcagtggcctgggtcagccaatcgggaatggcgttttcgagaaagggggtgtgcaggctttttgaagcgggtgaagccgtcatgctgtctctccttgggtagtggagcagacagcagatcacttcggcaggcgcggctagcggtagatagagaacaccaccgaaggctggcgccagggcgggcaaccctggcgccgggtggtcaggtgatcgggttggcgcgcagctccgtgcgggtcagtgtttcaatcaggttggcttcctggatggcaagctgggcctgcaagtccctggcctgctgcgcgtagtcggcgtcgcccagcgagccttcgacatgctggtcatgcagcgctgccaggcgctcatggaagggctggccctgcgcctcgaattgctcgcggtacttctgggtcaagtactcctgccagaattccctggagatcagcgcctggagttcggcgggcgaattgttcagcttgaggatgttgtcgcaggtggccttcaacacctcttcactgacccggcccaggccgatgaactgcgccgattgcggttgtcccggcaaatcgagtctggttttgtctttgagcccgaatcgataggcgagcctgatttcaacttcctcgagcatggcgatctgctcggctttctcctgcgccgacaaccttgggttgttgttgatcgcctcggtgcgcctggcgatatcgttgagcgcggttttttccacctcgtcgagacggaacaagcccctggacaatttgatcagtgcggcgccttgattcacatcggcagccagggtcttggcgttgtgcaccatggccatgacttccacgttgctgaacgacagcccggcgcgatcacagcaggtcgcgcggcctgcccattcgaacatctgctcgcgcaacgcggcggattcttcggagttttgtgtgatggtgtcgatcaccctccacacccgttgttgcaggtctgcatggccgccgcgaggttcactcaggccttcgagcatagcgaagaaaccgtcactgccaggctgttcgcgcaattgccgccactgggtttgccgggcggcgacctggtcctcggccaggtcttgggtccagcgttgagtctgcgtcggctcgatcatcacatggtcccgaatgcgcggcggcagaggtgtgcgcgccggggcgagtgccgagatgaccagttggttcgggtggtcggccgaggccaggcctgcctgttcaagcctggccctgtagtcccttagttgctggcgcgtctgctcggtcaacgggttgttgttgagttcgattttgtgagtgagctgcacggactgcgccagttgcgcgtcgggtgggttgatgagcgagccgggcagttgggtgatgcggttatccctcagcgcgaccgtgtccagcaagggttgcgcgcctaaccctgtggggaatgtctcaagcccgcagttttgcaggcccagcgtacgcatatcggtgaacacgctgaagtccggtgtaaggcccagtgggttgtttcccagcagcagcgccctgagcgtggttcgccgggccagcacttgcgcggtttcagcggtcaatcggatctggttgttctgcaggaacaggcgggtcaacccgttcatctcattgagcgccatcggcaactcgcgcaactggttgtttgacaggtccagccagcgcacgccgctatggcgtagcaggaactgctcggggcaggtgctcaggtgcatgttgctcagtttgagtgagcccacgtggctgaaatcggcgtccagttcgggcaggctcggcaggttgaggccgctgaggtcgagttccaggccaatggctgtcccatcgttggcgtgttgtgtcggcgtttccttgcgccagcacttcaggaccctctccctggcctggtagcggtcatccaggtcgatgacattcagcaagcgctgttgcgtgcgcacgtagcctccgccggtgcggctgttggcattgccgcccgccgccgcccaggtattgagttgtgtgttgagcgtctcgaactcttgctccaagcgcaagagttcggtgttggcgccgtcacccagggcccagatgaattgccgggattccagaatactgcgcctcgggtacagcgcccgggtgcgttcaagctgcgggttttgcatatcgaacacatcggcggttccgatcaggtccggacgctgttcgttcaggcgcctccaataggcgtcgaagcgctgggcgtattcttgcgggaatgggttgcctttgaggcgggtgactccgttgatcctcgcgatggtttccagttgctgcggttgtggggcgagattggcctcgggtatttcgcgcaggcggttgttgcgcaggtcgagcagttgcaggctggttttatcctgcaggccggtcggccactgatcgatcccggtataggacaggtccagtgttttcaaacggttcaaggcgctgacgtctggagtgatgcccaggcggttgccgctgagttccagggtttccaactggtgcaggcggctcagttgggcggcgctctgtggggtcagcatgattttgttcgctttcaggctcaactgggccagctggggcattgcgtcgagtccatcgggtaacgctgcgagttcgcagccatccaggctcagggtcttgacctggcggaagttgttcagaaacgtctgggcattgcccgaccacattttggtgttcagctccagtttctcgacgtggctgaagtctgccgtcagcgcgggcaggtccactggcataccgctgatgattttcagcgtattgcccgactcacgacgccagcagcgcttgatgtcctcggcgatcacccgggcgtagccgccagcccggtcgtacgcagtcaccaccaggcgcggtggattggctttgacccaagcctccagatcagtttcgagcttgctgtactcggcttcccgcagcctcagcctggtacgcacgtcgctgcccagtgattcgataaaggcgtcgatttgcgcatcgctgaaagaggggtagagcttgcgcacccgctgcgctgtgctgcgaaatggcgccaccagtttttcgtaaccgcgaccgccgcccagtaaacgcatggtggtgtcgtaggccggcttgcgcaccgggtgttcgagcaacacgccgcgcagtgcctcgcgtggcaagggggcggcctggatggcagcttgcaactgtcgggcgtcggccagccgaaggtcctggcgttcacccgatgacagcgcgtccagaatggcctggtacagatccgtagggcgaggccctttgaattggccgttttctagctgcaccaggattttgcttgtcgtggtgtccagctcgccaatggcatcgagcagcggaccttgggcggagtgctggcgcagttccatgcgtgctccgcgacgccagccaggcagggtctccagggtgcgcagggccaggcgctggctgtcgaggtcgtacggggtgttcaggtgcaggttttcataggcgcgggctacccgggtttcttgttcgacccattgcgccgtttcggcgagcgtgtctggcaggcgcccagtgcgacgcaaggcgagcaggtcttcggcgctgagttgggtgagcaaatatgctgcgatcggtgtcggcagtttggggtaggtgtctttcaagcgttgcacgtccaggtcggtgttggccgtcagcttttgataacgctcctccacctgtgccgccttgaaccgttcgacaaaatcacccagctcccggcgcaatttgccggcccgcattgcaagcgtgtcctggggcgagccggggatgtcgaccagttccgggtcggtgccttgtagcgtgttcagcacttcacgcagtccttcgccgcgtgccagttgttgcgcggtgaggagtaccgtgcgcctgcgcgatgacggtgggtagggttcgtcgtcccatacgatgcgcccctcatggtcgattacccgcagcgtcggggagctggacagcaggccgcgccgcttcatcaagtccagttgtgtgcccaggtccgcctgggggtagacctgagggtcggcgcttttgagctgttcgatgaaggtggtgacctgctgatgaagcctgaaacgctgcaacgagtcggccagcagcaggggcacgttttcggcgttggcatgggcttcacgcaaggcgttggcgctcaccccgctggcttcttgggccttgaacaattgttcgtcatcgagggcctcggcaggcaggcccaggcgccgtagcaaggtggtgtcatcccaggccagtggggtttcgccctcgtggtgccaggcgccttcgccattgtgtgtcagcttcggtgcataggcgtcggtacgggtcgggtgctggatgcggtattcggtgccttccgggtcctgggccacgcgataggtccggccttccagcggcagaatcctctgcccgtcctgggtgtacaagccatgcgcatcgggccgggcatccgccgccagtttgacgggcgatgcataaggctccaggtcgggtttccacaaacgggtcttgccgtcggccgaggtcaccggttgcaattgctcgaccaccggctcggccggcaccgcagtcagcttgccgaggcccttgcctgcaccggccagcacggccagaaacaccaggttctccgccacgtcgatgaggtgggccttggccgccttgcgatcaccctcagcccattcctccacaccctcgaaggtttcatacatcaactggccggccatcaccgccatcatgacttcgcccagccccggcacgaatatcgacacgccggtcaacagcagcatgccgatattgagcagcgccgccagtttgcgcgagcgcacggcggcgtcgacatccgccgtgggcacggcgtgactgcgggcgtcggcatagactttggcgcggtgctgttcgtagaggtagtcccacaggtcaaagtcgtcccgccagaacaggccgctgtgggctggcggcgtgataacagggtgcaggtacgggtcttcgttggggacttgcttgggtggcggtgacgctggcaaatcgttgacccggctgaagatggaaaacgggtccagcccctggcggatctgattgagcagcggtgcaaagggggccaggtcctgggacaacgtggtgtccgaggtgtcttgggtgaactggctgaagtaatccgcgcggtcggcgtaattgacgaactggctgaaaaagcgctggtaggcggtggggttgccgtcttcggccgggggcgtgtcgcgggcggtgaagcgttgtttgaacaggggtttgagctggcccagggtatagcgcttgaggggcgattgcgggtcgttggggatgtacagcagcaattggctggtgtcgtgaagctggccgctgagcaggaagaccaccacgccggtcaggcgatgcttggccaggctcaggtcacggaaccagacgcgttggccgttcagcgtcgggcgggtttcgccggcgatcaccgaaagcaccatgcggtagtccgcgtcgttgatgtcttttttcagcagggcctgttcggcggcggtgcgcagggcagccctgtgggcgacgacgaagtgtttgcgcagcaccgtcgctgcgagtgcgtccttgggctccaggaagtccttgaggtaggcctggtactttgcgccgatatccagcgagcgacacaacccggtgaattgcgccaccgtcagcggggtggataccgcgtcaaagtcatccccgttcttgattacgaaccccgacgttgggtgaaaggcgtcggcttcacattcgtcctcttcgaagttgtgcagggccgcttgcagcagcggcagtttcaatgcctcgaaccagccggcggtgatggacgcgatgctgacggtgatgggtttcctgagcctgaggaaggtcttgttcacatccaactgaaccttgaaccgatcgttcagcgccttgaccagcaggggcctggcaaaggtgtcgatgtcttgcagcgtggacatcgccttgcccagcttgccttgcgcggtgaagctggcgacgacgctgtcttccagcgtcttgcgttgcgccgccgaggcctgttgataccaggcgggcagcgcggcatccgagtgtttgagtgcgctgcggtatgacgaaggcacgtctgccagccaggccggtatggcgtctttgaggaagtcatgatggcggctgtcagtgacggatggagactcaggcatggtgtcgctcctgcaatgaatgagggagtcgacagcacatcatgcgcccaggctcgggcagcggtagataggtagggccgacggccggcaggcgcgacttaggattgcgcgattgtcagatcacacggtagtcacctcatgtccgagccaacctccccacctgcacccattgaacaaggccagcattacgctctgatcaaacaggcgattgcgccgtgcctgagccaggcgtcgccctcgcgtcgcctggcgctcaagcaaaccccggcacagattcccgattggtatgccgccgcctctcaatcgcgcaaagaccaactcaaggcgttgctggacgcacgttgcacgtcgctcaacgcgttggaaaagtccctggcgaagctgcagtcggtgacagccttcgcccagccgctgctggaagcggcgctcagacaggccggtttcgaactggacgtcaatcaaacctggttgcgcctctactatccggtcgaagacgcctttggcgtggcgaccggcgggttcaggaccaagacattctcgttgttgcaggcggccttgaacaacttcgaggcgcgggaagcccgggccgggtttttcaatgcgtcttccgggttcatcaccacgcccgatgcccggggacaattcgagcggcatgccacgacgctgaagatcgagacgtttgcccagctgtgccgtggcctggacctgggcgcgaagtaccaggcccatctcaagtctttcctgcaaccacaggatgcggtcgccgaaggcgtgctgcgcgagcgttacttgaagcaccagagggcggctttcgaagcggcagcctgcctggccctgctcaagggcgatatcgatgacagcgaccatgccctgttgatgcgcgtgctggccggcgagcggcagatcatgctgggcgacaagcaggtgtggtaccgcgtgccctgcctgatgaacctgcacctgcaggattgcctggtgatcgacccttgcgtcaaataccgctactccacatgggtgatcgtttatatcccggacgaccccgaccacccgatcaagcgctacgcctcctatgacgccttcagcaacgccatgaccgaccggctcaaggctgggccggggagggctgctgatcgctctcaagtcgcaccggccacggactaccagcgcttcatcagccagttcgttgcctaccagcaccggccctactactttcgcaggctcaccgagctggtgctggatgcgccgccgcagcccttcgccttgcaatggatacgctcggagtggggccagtacatcaccgagctcttcagcccaccggccatcacagggattgcctcgatcttcggcgattcccagccccaggggcgcgtaccgatcagcgcacctgaattcgatgtcaatgcggtttcgatcaaagggctctgggaagaagtggacctgtggccctatcgatacgaaaacctgcgtacccggctgtacgccgatgcacgcgcccaggccgtgagcaccgcggatgccgacgaagccggacggtctcggcgcctggagcactatctgaatatcggtttgtttggcgtgaacctgctgggcatggtgatcccaccgctgggcgtggcgatgtcattggtgacggccgggcagttgttgtacgaagtgctggacggtgctatcgattgggcgcagggcgaccgtgaagccggctgggcgcatatcaccgatgtcattgaaaacctggcgctgctggcggtcggtgcgaccgtcagccatctcaccctttcgccctttatcgaacagctcaaagccgtgccattgcctggcggcaaggtgcggctgtggaaaccggacctgtcggcctatgaacatacgttgcggttgccacaaggctcggtcgcggatgggcgcgggctccatcgggtcggcggcaaacaggtgctggaactggaaggcaagcgctatgccgtgcaacaggatgccgagaccgagggctactacatggagcatccaacgcgcagcgacgtctacaagccccggctgaccgccaatggcagtggggcctggaatcatgaactggaacagccgttgcgctggcgcggggcaaccctgatgcggcgcctggggccggtgatggacggcttcagcgacgccgagctggagcagatccgtcgggtcagcggggttgaggaagacaggctgcgtcgtgtgcatgccgagggcgagcccgtgccggcgatcctgctggacacggtgcgccagttccgggcctatcacgatgcggtggcggtggccgaggggatcggccagggcaagctctccagtgccctgtgcagcttcccggccttactggtcactgagttgagcggatggccggagcatctggcgctggaagcctattcggacattgaaccgcgcagcgtgtcggccaagtacggtaattcaaaagccattgcgcgggacacgctgcgtctcagccgcatggcgttgatgaggggggagttgcctgcggcggtcatcggctttttgagcgaagcacaaacccacgcgttactgcccggctacaccccaaggaccccggaactacgcattggcgccttgcgcaaacgcctgaaggactttgcggtgaaccagcgcgcccggttgatgcgcagcctatacgccgagcagcagcccactgcgcagcccgccacccaattgattacacgccagtttccacgcgtgccggcgctgatggccgaggagctattggtcggcgctacgccgcaggaattgcgcaccctcaacactgaccagcgcgtgccgttgcgcattgccgaggccgcacgccaggcgcagcagcaaatgcgcctggcccacgcctatgaagggctatacctggaagcgctggcggacaaggataccgaggtcctggcgctcaacacgcttcagtccctgccggggtggaaggacgacctgcgcctggaggtgcgcgacgccgagctggaaggggagttgcgggccagcttcggcgccgaagacgcctctgagcgcaaggtgctggtgcgggtcggcgagggccgctatcaggcgcgcaatattcgtgatgaaaccctgcacgaaaccgaagacctgtatgcggccctgcaacatgccctgaccgatgcgcaccgtcgggccatcggcttgccgagcatcaaacaaggtccacaactgaaggcaaaaatcgttgaaggcgcgctgccacgggatcaactgcggccattgctcaagatgcagcaacgccgctaccgctttgccgaccgcccctcgatgcgcctgcccggcggacggctggggtatcgatggagcaatcatggccaggacactgcctgggggcgcatcgtcgaggagcgcgtgcgcagcctctaccccacgttgaccagcgaacaggtgagcgcgtttgtcgatgggttgggcgtggagccgcacgcgaagctcaaggccctggagctggaatacaaaaccttcgacaacgcgttgcagaactggctgcgcgagcacgtccggcaagtgtccgcagaggctcgccgctctggcgcgttcctgcaccagcggcgcgcgcgcctgaggatcgtcagggccttgcgcgaagcatggcgtcgcaccggaagcgaggacctggatatcagcgggtattcccatggccaggtcattgacctgtctggagaggacctgttcgaccaattggaagaactgcccctgctgaccgtcaacttcgatcacgtctcggcccttgaactctcgggcgccggcatcgagaccgatcccaccccgttcctgcgtcatttcaagcgcctgcgtcgtctcggcctggagaacaacgagctgacggtgctgcctgaggcaatcgggcagatgttgcgtttgactgcgttggacttgtccgaaaaccagatcgtcctggacaccgacgctgtcaatcgcctgaaaggtctgacgcaactgaactacctgggactggagagtaacccgcttcacctggcccccgacatcggccgcatgccggacttgagcatgctgctgctcggcgataccgggctcggcacttggccgcctggcctgttcgatcagcctcgtgcacgttcttttgtactggacctgagtgccaatcggctggacagcgtgccgcaggtcgaaccggggtcaagccaggcgaataccgtggcgcgtacgcggatcaacgcggaaccacggtacatctccgcacagaacctggacgtgatcaggggctatcggcaatcggtagggctggagcctgatcgaccctatccgcccaggggtgtgcttgacagcattcattggcgcacgggcttgagcgatgagcagtgggtcgccaagcagcacctgtgggacagccttgagcacgagcacgggtccgagcctttttttagcgagttgcgcaaactgtccgagtccgcagacacccttgaggaggacgccgccaaagccgacctgacgcgcaaagtgtggaccatgatcgagtctgcagctgcgcaccgggctctgcgtgacaagctgttcattatggccgcggcgcccaccacctgtgtggatgccggcgcgcaactgttcaatgccatgggcattgaagtgctggtggcccaagcctacgaactggtggccgaggacctggtggaacgccaattgctggagctggcgcgcggcaagtcgcgcttggacgagttgggccggatcgcccgcggcagggttagtgaactggtggctcaggggcgcaaattccccgagtacgatgccgaggggctgcgcgtcacgcatcgtgatgcgcaaggcaacgtgatgcgggacatcgacgaggtggagatctacctgatttacgccaccgagttggcttccgaggacaaactggacttgccttggcaatcggcgcgcatgatgttcgaggagccggatgtgacccctgccatgatcgagcaggcacgcgtgcgagtactggccctggaagagggcgacctgttgcgcaagtcgattggtgagcagccgttttggctgggctttctcaagcagtccaatcccgggccgttccaggcgctgcaggccgaggccgaggcggcgttcgatcggtacgccacctcggacccggcacggttcgaggctgaaatggcgaacctggcgacgcaagacaaggccctggtcgccaagctgaccggccaggccctggaccgtgcgcggttgtcgcgtatcggcgtgccgctcgtgggctagaacaggaaatagcgctgcgccatcggcagcacatccgccggttcgcaccacagcaacacgccgtcggccttgacctggtaggtctgtgggtcgacctcgatgtggggcaggtagtcgttgtggatcaggtcggttttctgcacgtcgcgacagcccttgaccacggcaatctgctttttcaaacccagggcttcgggtacgccggcgtcctgcgcggcctggctgataaaggtcaggctggtggcatgcaggctgctgccgaagctggcgaacatcgggcggtagtgcaccggttgcggtgttgggatcgacgcgttggcgtcgcccatcaggctggcggcaattgccccgcccttgaggatcagcgtcggcttgaccccgaagaacgccgggcgccacagcaccaggtcggcccatttgccaacctcgatggagccgacgatatggctgacgccgtgggtgatcgccgggttgatggtgtatttggcgatgtagcgtttgacgcggaagttgtcgttgcccgcaccatcgccaggcagggcgccgcgctgttttttcatcttgtcggcggtctgccaggtgcgcgtgatcacctcgccgacgcggcccatggcctggctgtcggagctgatcatggagaacgcacccaggtcatgcaggatgtcttcggcggcgatggtttcacggcggatgcggctttcggcgaacgccacgtcttcggcgatgctcgggtccaggtgatggcagaccatcaacatgtccaggtgttcgtcgatggtattgcgggtgaacggtcgcgttgggttggtggaactgggcagcacgttggcaaaaccacaggccttgatgatgtccggcgcatggccgccaccggcgccttcggtgtggtaagtgtgaatggtgcggcccttgaacgctgcaagggtggcctcgacgaagccggattcgttgagggtgtcgctgtggatcgccacctgcacgtcgtactcgtcggccacgctcaggcagttgtcgatactggcgggggtagtgccccagtcttcgtgcaacttcaagccgatggcgccggccttgacctgctcgatcaagggttccggcaggctggcgttgcccttgccggtgaagccgatgttcatcgggaacgaatcgctggcttgcagcatgcgcgccagatgccacgggcctgaggtgcaggtggtggcgttggtgccggtggccggtcccgtgccgccgccgatcatgctggtgacgccgctgttcagcgcctcttcgatttgctgcgggcaaatgaagtgaatatgcgtgtcgatgccaccggcggtgaggatcatgccttcaccggcgatcacttcggtgctggcgccaatggccatggtcacgccgggctggatatccgggttgccggccttgccgatggcgtggatgcggccgttcttcaagccgacgtcggccttgacgatgccccagtggtcgatgatcagggcgttggtgatcagcgtgtcgaccacttcatgggcgagcaactggctctggccctggccatcgcggatgaccttgccgccaccgaatttcacttcttcgccgtagacggtgaagtcctgttcgacttcgatgaacagctcggtgtcggccaggcggaccttgtcaccgacggtggggccgtacatgtcggcgtaggcttggcggctgattttcatgtggttgccctgaagatatgtgttgaatgtgagatcgctatcgggggcaagccccctcccaccttgatgtgtgaacgcggtcaaaatgtgggagggggcttgcccccgataaggccctaaagatcacccatgatccgacctgcaaacccgaatacccgcctgccaccactcaaatccaccaactcgacctcgcgactctgccccggctcgaaccgcaccgccgtacccgccggaatattcaggcgcatgccacggctcgccgcacgatcgaatgtcagcgcgtcattggtctcgaaaaaatggtaatgcgagcccacctgaatcggtcggtcgccactgttggccacgctgagagtgacggtgcgccggccgacgttgagttcgatgtcgccaggctggatccggtattcgccaggaatcatgcaggttgccccagtgtcttgaagtagatggcggtcgggctgtagcgcccgtccgggctttggcagtagtcgggcagttcgccgatcttggtgtagcgcagcgactggtagaaggcttcggccggggagccggcttcggtgtccaggtacagcaggccgcgcttgtgctggcgtgcggcgagctccagggtgtgcatcagttgctggcccaacccatggcgccgtgcattgctgtgtaccagcagcttttgcacttcggcgcggttgaggccgttggctttctggcacagcgccaattgcacactggcgatcacctgctcgtcgcgcaccaccacccacagcagcaggctggcgtcttcgatgctcgcctgcactgtgcccagataagcccgcgcctgggcctcatcgaagtccgccatgaagccgaccgaagcgccatgcctgaccgcgtccagcaacagctcgatcaagcccaggcggtaatgggcaaaactttcagcattgactcgacgcagctgcgcggcgttcatcgatctcactccttgggcggttcggcgcccgggttcaaggccagttgcatgaaggtcaggtccagccagcggccgaacttgatacccacctgcggcatttgcccggtggtgacgaagcccaggcgctcatgcaggtggaccgaggcctggttgccgctttcgatggcggcgaccatcacgtgtttgccgcactcacgcgcacgttcgatcaacgcttgcatcagccgtgggccgaggcctttgccgcgctggtcgttacgcacgtacaccgagtgctcgacgctgtagcggaaaccttcgaagggacgccagtcgccgaacgatgcatacccggtgacttcatcgttttccaccgagaccaggatcggataaccctgggcatgccgcgcactgaaccaggcctggcggttgcccaggtccaccggttgttcgttccagatcgccgtggtgttcagcaccgcatcgttgtagatgtcgcggatcgccggcaggtcgttttgggttgcatcacgaatcatgaccaggcctcacgcgatgggttggtgaacggtgaccagtttggtgccgtcgggaaaagtggcttccacctggatgtccgggatcatttccgggatgccttccatcacctgttcgcggctgagcagggtggtgccgtaatgtatcaggtcggccacggtgcggccgtcacgggcgccttccatcagtgcggcggagatataggcgatggtttccgggtagttgagcttcaccccgcgcgccagccggcgttcggccaccaggcctgcggtgaagatcagcagtttgtctttttcccgtggggtcaggtccatggttcaggtgctccagattcgtggtgaaacggcttcccggcccagcaccgccgggcgcaacaggcgccataaatcgatcagccatgcgcgcgccagcagcgcttcactggccaggcagcgggcgaccagcaagcccggcaattgggtcaggtcgccgcgcacggcgtggggcagggcgcggcaggtttccagcagttcgggttcgatatcgccggtgagcagcaacgtcgcgaacactggctggccgtccagcccgatgggcgactccagcaagccgtcggcgcccacaatgcgctggcgttcatgccagagcaactggccgtcgcggcggatatccagctgtgattgaaaatgccccagagcaaagcgttcaccgctggccggtcgacccagggcaaccacgtcccagtaaaacagacgggcatcgccctgcaggtcgatgcgcgtggtgagttcggcctgggccgcgctgaacacgatggtttcctggggcagccactccagcgtggcaccggcctcaacgctcaattcgagttgctggaacgcagggcctttggcgcgataccacttggcggcaccggggctggtcagttgggcccaggccccttcggcgacatgggcacggatatccaggcggtcaccaccggcaatcccgccgggcgggtgcacgatgatgtgctggcacacctcggggccttcggcgtacaggtgcttttgcacccgcagcgggccctggtggcggcgcattgtcgggcgcgtggtatcaccgaagcgcgcatagccgagttccagctcggcatgccagctgggggtgaacagtgcggtggaggcgggcaggttcatggtgagtgcttgaggtcttttttaaacagcttttccctaggtgtagcaaaggacgtgccggggtgaaacacggattagaggtcggtcctgatggaggcgtgcactgttgtggtgctgtgccgtcttgagcgatttattcaatgcgctgttgtggtgcgctcggccagatatagttaggccccttcagggagggcgggagcgttagatgggcgtttcttcctcgacccttcccgaaggtgctgcacgatggacatccatgacatgccacaacccgatggtgttcggcaaaaccccgtctcagatgggcaactgcctgccctcagcccaccctttatcagcgccgatgatgcggcgtattgggcccatacccaaataggcagcaagcgcgaacgcgagtacggcggtgcgattctcaagcacgcaggccagtatttcgcgacagtgcccaagcagggtgcgaccaagcaaatagcgctcgatagcgtgatcccgatcaaggatggcaagccgatcttgccggcggattacacctgctccgggttttaccactcccatcctgataccgatgatgactttccctcaaggatgttcccggccaggcagcgttcaattctgcgcggcttgttttcttaccccgacatgcaggtcatttttcgcttgagcggtcatgtaccggcgcattatctgtcggggccagatggcactttgttgaaatttgtcgtgcgaacccaggcaaagttgcaggcgtttctgacccggctggaccccgccatccaccctgagatcgactttttcacggactatgtgccggaggtggccgaggccggcgcactgtgggtactggtgcccaacgctgcctggggcggtgtgcgcgggcgggtcagcaaggactgggtgctcaaggagtgggtgaagaacacgcccttgaagggcggcgagcggatgcaaccgttctcttccgctgtctttgcattctcacaactgtcagcgctgattgcctttacggacgaggcgtttgaccagccactctgggggtatctgctcaaggccgcaggccgcgatgaatacgtctatgtgcctggcgagggtaccttggatgaatgggggccgccgcacaccctattcccgcgtgacgccaacggtcagacgcaactgccgccaggctttctgatcgagggcgtcttgatgcacctggtcgataaaaccaggccaccttttttacccgcgcacctggcgagcctgatcgaggtgttggcggacgctcccgctctctttgaccccctgcgcccgccgaccctgtcgcagcggctccccgatggcggcttgaacagttacaggctctcgggcacggatgccgagtcgtcgttgctgggcaagggcggggcgatcgcacaacggcagatcgagaccggcgcgctcacggtgttccgttaccttgaccggttggctagcatgggcgagatggcggtcttgaaggcgggggtgatttggccacgcattggaaaaatacagccgtggtttgaagagttacggccccacttcagcccggattttctcaggcccaatgacgctgcccgctacctctgtgagcaagtattgcggcgtgatatctctcattttggctacatcctgcagcgcaatgacggtaagttcgtggcaaccggactgatcgccgatatcaaccggctggtgggtatggggatgtcgaaaggtagcgttctcgacgtcctgacgttgccggcagattatcgctattacggttttttcgttgccgttggcagcaacccggaagaactgaaacggatgctggcctcccatccggacgttgaaggaaggcgctcgctggatgagcgtctgctgttgacgctgacgattccctatcggaattatgtcgccagcctgacggcggatggtcagcccattccttgcctttactattcgggtacggcgggttcactggtcaagtatgtgagcagcggcagcccacaagagcgcgagtttcatacggcgctgacagcgatcatcgacaccggtatcttcaagccccgcatggatggtttccgtggcacgcccctgcaagtcgtcagcaagatggcaagcctgggtgagttccatgtcatcgagacgaacgcggtcttcggcaactcccgtggcaggctgcctgtgacatggaacgcatttgagtcgtttgtctccgtgtctcctgtcgaaccgccgtacaactggatcgtacctttcccggaactggccgctgaagtggcgcacgggcagttcggcctcaagccgcagctgcgacaagtcgcgtttattttgaaagctaccggagcccaagcgtacttctcgacgcagcctgcgcccatcggcagccggatgttttcaccgtcatcggtttttacccaggatgccaacggtgatccgctgatacccgaggggtatgaggtccacggaatttgctaccagtcgctgcccggtactgggatgaaaacccttcaacactggttgtacgaaagctttgtcgcgccccaggacctggcggctgcaatcgcccaggcccgagagtcgaaccgtacgctgcgtgcgctctacttgagcacgcgtgacggtgcgcaattgcaataccgcttcagcgggacggggttggagagccagttgtatggcgtcacacctaccggggaggtcaacgataatggccatcaggcgagtttgcgctccggagccgtgacgcctacggagtatgtactgcgggtggcggcggcgggcgagttgtcggtgttggtggccggcaagctgtgggacatccagggccgcgtggaaccaacctggcggccctttgcgcgctaccgcatgccggagttcagtgcgccgtttctgcaggccgatgatgccgcacggtttgcccatgaacaggtgggtgccgatcgttatgctgaatactgcggttgcatcctcaagacacccgaccagcgttttgtcgccacgctgccggtggcctgtctggaggcgcagcggtttgccatcggcacggtgtttccggcggaccacaacggtgtgttgctggtccccgagccctacgtgctctacgggcaatacgcgtcatgccggtcggttacccggctggacaagacccgcatgcagcgcaacggctggtcacgggaggaggccagtgtcgattggcaactgttcagcgatgccgatctgcgcaacctcatcggcaaccggcactgggtctccaccggctacctctcctgcgatgaggacggcctgattgcctttgaccttacgggcgccaaggcccaattggatgaattgaacccggacacctcctcggcgccccgcgaaccgcaggcccgggtgcggcacttgtcggccagcggcttgcgcattgtgctcggcagtccgttgtggggattgcctggcagtgtctcgccaacctggcgtgcctatgcgccggcggcaacctttgaaaaaccgcagcaggtggcgtttggcgcagtgttttccactgccagggaagcggttgcagacgctcacaagcgattgcgccggggctattacgcggcccagacgggttttgcttttttgctcaagcacgcgcaaaaggaccagtacgtgctgagccagcttgtccctgcggatggcgccaatccgttgttcaacctggcgagtctgtttggtaaccgcgatgacggtgcgttcatttttccccaggcatttgaattgcacgggttgtattacgcgcgcctgtggatgcccgacaacctgcagaatccgcagcgttggctggctcggcacttcctgtcttcggccgacctgtacagcgccttcctgtccgcccggcgttggcgtgatacgggtagcagcgtgaccttacccgtgtttatttcaaccctggacaacgccgtgctcgagtaccagacggctgtctcgacgccgttgttcgacccggaaaaacaggcgtccggcacctttgaagacgtgcatacccaactgagcggaggccagctatcaccccaggcatttgttagaaaagtcatcggcacgagctggctcggtgtgctggtgcccagtgaatgctgggacgaggagagcagcaggctgggcgccgactggctgccttatgccgacttcagtcgcagggcgttgagcccggcgttctttcaccaggcggatgcgctgcgctacgcccaccagcgcctgggcaatcgccgcgacagggtgtacggcggcttgctgctcaagcgcgtcgacggcctgtttgtcgccaccgagccgctgcccgtcgcgacagagaacttcgatcccaaatggatcctgccggatgaagacgtgcgtgcggactggttggcgccgggcatgacgctggtggcgcgctaccgttcgcggcgggacgtactgcccagcttggtgctggacgaggacggcgaggcggtctatcgagcgatgttgtccaccgatgtgctgggcacggcgctcacgtgccagcacctgtggagccatgagtacctgttcgggctggatggctcggtgatcggtttcagttgcaaaagcgcaacggacgcgacccagcaaggcccgctttccaacgaccttgaagcgctccggcaagcgctggcaccggctgagcaaacgcctcacgacccgctgagcaacgcgctcgagaagcagatgcgcgacggtagcctcacgcctgtggcgttcgtcaatcggctgctcaaggtcgcctcgatgaccgtggtgcaaggcagtgcgctatggggcaatgctcaggtgctgggcagcggatggctgcctgcgcgtggttttaccgcgcctgaccggttcatccatgccacggccgatcgcgccttggggccggtgttcagtcatatcgatgacgccgcgcgcaacgcccatgaaagcgccggagagcgagaccggctgacctacggttttatcttcaagttggccaatggtcactggatggccagcctaccggtggacggtgaagaccgacgtttcccctacgacagggtgttgctgggcgggcgtttgccggtgggctgtacggtggcggcgctctatctgtgcgccccggctcgtcagccgcaagagttgcgcgcatcagcggtctatcacgccttcatcccgccgagtctgttgcgtgcagcgttggcggtggtgcgtacgaaaacaaatgccggggctgcgccttatctgccgttgtacctgtcctgcgccgacagcgccctgctcaaataccgtgcctcacgcctggacagtaactgggacgaagagtcgcagttgcaggcctatatccgcacgttgaatgggcacttcaaccctcacgactacattcgccaggtcgctcgtgccgggcagctcgaggtgctggtgacgggggcgatctgggccggccaagggccggtgtcacagtcctggcgtgaacgtgcgccagctgcggtcgccgcagacccggatgcgcgggtggtgctcgggccgctgttttctcatccggatgatgccgcgcggtatatgtggcgccgctcaccggctgttccaggcaaggcgagcatgggggctgtcctgaaaaatgcagcgggcaacagctatctcgccagtgagccggtggacgacagcgggccgagtgtccacgtggggctacgtatgaatacgagtgcttatcgacgcctgttcggctgggtgatgaacctggatgaacgcactcaaccgcgtcccaaataccctgcgggttaccgcgtcatgggcgtacagcaactgcacaagtgggaggccaatccggagcggctggctgaccgacatgaacaagctatcgccgaaaactttatctcgcagaaggagttcaggtttgtggtcgacatgttaaggcaggataaagtggctggcgcccgctactacttcactcccagaaatggcgccctgttggtctacgcgcccagtttcgagcgcgtcgagcacgacctgctgctgtctggctggatcgaccccgaatcggacaaaccccggctcaagaccagcgaagccctcacggtcttgttcaattccggtcggttgcatgtgttggagcccgaccgtttctggcaacccaaggggcatgtcgcatcgcgttttctgatggagttgcgcaaagcgcagcagactcgactcagatcgtgacgaggccacgcacaccctcgctttccatgtgctcgccacggccctgctgcacgatttcgccccgggacatcaccaggtactggtcggccagttcggcggcgaaatcgtagaactgctccaccagcaggatcgccatgtcgccgcgtgcggcgagcttctggatcaccgcgccgatttccttgatcaccgagggctggatgccttcggtgggctcgtcgaggatcagcaggcgcgggcggctggccaaggcccggccgatggcaagttgttgctgctggccgccggacaggtcgccgccgcgtcggtgtttcatttgcagcaacaccgggaacaactcgtagatgaaggccgggacttccttggcctccttcgcgccaaagcgtgacagccccatcaacaggttttcttccacggtcagccggccgaagatttctcggccctggggcacgtacgcgatgccggcatgcacccgctggtgcggcttgaacgcggtgatggcctggccttcccaggtcaccgcgccttccttggccggcaacaggcccatcaggcacttgagcaaggtggtcttgcccacgccattgcgcccgagcaggcaggtgacttcgccgatcttcacgtcaaaggacagcccgcgcaggatgtggctaccgccgtagtattggtgcagcttgtcgacttgcagcattctcaaacctccttagatcccacataaagcaagccagtgtcctggtcagcgaccgaggtaaacctcgatcacccgctcgttttcctgcacctgctccagcgacccttcggccagcacgctgccctggtgcagcacggtcacgtggtcggcaatcgagccgacaaaccccatgtcgtgctccaccaccatcagcgaatgcttgcccgccaggcgcttgaacagttcggcggtgaactcggtctcggcgtcggtcatccccgccaccggttcgtccagcagcaacaattgcgggtcctgcatcagcagcatgccgatttccaggaactgcttctggccgtgggacagcaacccggcctggcgcggtgcggaggcggtcaggcggatggtgtcgagcacttcatcgatacggtctttctgttcgccactcaggcgtgcgcgcaggctggcccacaccgatttgtcggtcttctgcgccagttccaggttttcgaacacgctgagggcttcgaacaccgtgggcttctggaacttgcggccgatgccggcctgggcgatctgcacttcgctcatgccggtcaggtcgaggttttcgccaaaccaggcggtgccgtggctggggcgggtcttgccggtgatcacgtccatcagcgtggtcttgcccgcgccgttggggccgatgatgcagcgcagttcgccgacgccgatgtacaggttcaggtcgttgagggccttgaagccatcaaagctcacgctgatgtcttccagggtcaggatggtaccgtggcgggtgttcaggcccttgccggccgcctggccaaggccgatggcatcgcggccgctgcccgcatcgaaaatgggttccagcatgacgttcctcatttcttcaacaggccgataacgcccttgggcaggtacagggtgacgaggatgaacagcgccccgaggaagaacagccagtattccgggaaggccacggtgaaccagctcttcatgccgttgaccacgccggcgccgagcaacgggccgatcagcgtgccgcgcccgcccagggccacccacacggcggcttcgatggagttggtcggcgacatttcgctggggttgataatgcccacctgcggcacatacaacgccccggccaaaccacacaacaccgcgctcaacacccacacgaacagcttgaaaccacgcgggtcgtagccacagaacatcaggcggttctcggcgtcgcgcagcgcagtcagtacccggccgaacttgctctgcgccaggcgccagccgatgtacaggcttgccaccagcaaggcgacggtggcgacaaacagcaccgcccgcgtgcccggctcggtaatgccaaacccgaggatgctgcggaagttggtgaagccgttgttgccgccaaagccggtctcgttgcggaagaacagcagcatgccggcaaacgtcagggcctgggtcatgatcgagaaatacacgcccttgatccgcgaacggaaggcgaagaagccgaacaccagcgccagcaaccccggcgcgagcaccaccaggcacaaggcccagaggaaatgctcagtgcccacccagtaccacggcagttcggtccacgacaggaaggtcatgaacgccggtaactcatcgccggaggcctggcgcatcaggtacatgcccatggcataaccgcccagcgcaaagaacaggccgtggcccagggacaacatgcccgcgtagccccacaccaggtcgagggcgagggcgacgatggcgtagcagaggatcttgccgaccagggtcaaggtgtaggccgagatgtgaaagagattgtccggcggcaacagtgacagcaacggcagcgcgagcagtaccgcgaggatcaccacgccgagggcaatcgtcagcttggggccggccttttgcgtggccgtgagcatcaatggctggttcatcagtcgatcacccgtcctttcagtgcgaagagtccctgcgggcgtttctggataaacagaatgatcagcgcgaggatcaggatcttgccgagcacggcaccgatctgcggttccaggattttattggcgatgcccaggccgaacgccgccgtgacgctgccggccaactggccgacaccgccgagcaccaccaccaggaacgagtcgatgatgtagctctggcccaggtccgggccgacgttgccgatctggctcaaggcgacgccgcccaggcctgcaatgcccgagcccaggccaaacgcgagcatgtccacgcgcccggtgggtacgccgcagcaggcggccatgttgcggttctgggtcacggcgcgcacgttgagacccaggcgggtcttgttcagcagcagccaggtcagcagcaccacgcacagcgcgaaggcgatgatcacgatgcggttgtacggcagcaccaggttaggcagcacctggatcccgccggacagccacgccgggttggacacctcgacgttctgcgcgccgaacaccaggcgcaccagctggatcagcatcaggctgatgccccaggtggccagcagggtttccagggggcggccgtagaggtgacggatcaccgtgcgctccagggccatgccgatggcggcggtgacgaaaaacgccaccggcagcgcgaccagcgggtaaaactcgatggccgccggtacgtagcgctgcatcagcagttgcaccacgtaggtggagtaggcaccgagcatcagcatctcgccgtgggccatgttgatcacgccgagcagaccgaaggtgatcgccaggcccagggccgcgagcaacaggatcgaacccagggacatgccgctgaaggcttgcccgagcagctcgccgatcatcagtttgcgcttgacctgggccaggctggtttcggcggcggtgtgcacggcggcatcgctttcgacgcccggtgcaagcagggcttccaggcgcgtacgggccagcgggtcgccggtattgcccagcaaacgcacggcattcaggcgaatggccgggtcggtgtcgaccagttgcaggttggccagggccaggctgagggcgctgtgaacttgctcattggtttcggtggcgacctgttggtcgaggaatttcaactgcgcgggttgtgcgcttttctgcaaggtcttcgcggccgccagacgcaccttggggtcggcggcgagcagttgctggctggcctgcacgttatcgatcagaccgcgcaggcggttgttcaggcgcacggttttggtctcaccgttgacggtgagttgaccttgttgcagggcgtccaccaactcgatgcgcgccgggtcaggctgggcggcccagtcctggagcagcttggcttgttgcgtcgggttggcggccaggaagtcttcggcgtcgctggcgtgtgcggccaaaggcagcaacagcagggccgtgaggatgaaacggtacagggcagtaggcataacaaaatgtcctgatcatgcgcggacaagcttgatgtgggagggggcttgcccccgatggcggtgggtcagtcagcccatgcagagcctgacactcagctatcgggggcaagtcccctcccacatttttatctgcgcttggggcttagttacttttcaccgcatagtccggcttcttgtcattgccaggaatgtacgggctccacggttgtgcgcggatcggttcctgggtctgccacaccaccgagaactgcccatcggcctggatctcgccgatcatcaccggcttgtgcaggtggtggttggtcttgtccatggtcagagtgaagcccgacggcgcggcgaaggtctggccggccagggcttcgcgtactttgtcgacatcggtggacttggctttctcggccgcctgcgcccacatgtggatgcccacgtaggtggcttccatcgggtcgttggtcacggctttgtccgcgcccggcaggttgtgttgcttggcgtaggctttccagtcggcgacgaacttcttgttcaccgggttctccaccgactggaagtagttccaggccgcgaggttgcccaccagtggcttggtgtcgatgccgcgcaattcttcttcgcccacggagaacgccaccaccggtacatcggtagccttcaagccctggttggccagctctttgtagaacggcacgttggagtcgccgttcacggtggagatcaccgcggttttgccgccggcggagaacttcttgatgttggcaacgatggtctggtagtcgctgtgcccgaacggcgtgtagacctcttcgatgtctttatccgcgacgcccttggaatgcaggaacgagcgcaggatcttgttggtggtgcgcgggtacacgtagtcggtgccgagcaggaagaaacgcttggccgcgccgccttcttcgctcatcaggtactccaccgccgggatcgcctgctggttgggcgccgcaccggtgtagaacacgttcggcgacatctcttcgccttcgtattgcaccgggtagaacagcaggccgttgagttcttcgaacaccggcaacaccgatttgcgcgacaccgaggtccagcagccgaacaccacggcgaccttgtcctgggtcagcaactggcggcctttctcggcgaacagcggccagttggacgccgggtcgaccaccaccggttcgagcatcttgccgttcacgccgcccttggcgttgatctcgtcgatggtcatcagcgccatgtccttgagggacgtttcggaaatggccatggtcccggacagcgagtgcaggatgccgaccttgatggtctcggcggcctggagggtccagctcatgcccatggcggcaatggatgccgacagtgtgaaagccttgatcaagctgcgacgcttcatggtgcgatctccgtgtacccaagtgttgttgttggacagatgcaagggcgattgcaaaggctgtgcccgctttgacgggagtgctgtccagggctgtatccgggcggggggctacgcaggccgcactgaaacggcgccgtagcagctgggtggtgcggggcgggcattgttttggtgcgcggcgccgcttaactatttagcgcccggcgaatggggcgcgggaggatggtgggcacttcgattctgccaggagctgttcacatggacgaccaacccacgcgcccgcaacgcgctgcacttgcacggggccacgccaaactgagcaggctgaccccggcgttcatcagcaccgacgatctggtgcgctaccttcatgaacgcatggccccacggttgcagctggaacatgccagcgtgctgctgcaacgcttgtccgacggcctgtatctggccaatgaaccgattcccgaccggcccacggtgttcaactggaacctgctgctggatgtcgatccggtcagccaggactttatggaccctgaaggttttcgaattgtcggtggctggcatgcacacacgaacatgaccgattgggtcaaacgagaaaacccctcgtggacggcagatgaagtcaccgcgttccaggggttttattccgagccggacatcatcatcattttccaggaccgccatcaattcaaggtcgtctacctgtccggccccgatggcacactgcttaagttcgaacccgatgattccacctccggcgcggactacgcccgttggctacgcaaccgtggcggctttgattcgccccatgcccacagcggcaccctcgcggggtattaccagaagctggcgtcgctcgggcgcttgaccttcctggcatctattcccgcctggggcggttcggtgggcgcggtgcccgctgattggcaaccacgcaaacccttcaaggctccagcgctggcgttgccttgcagcccggtgttcatggacaagcagcaagcgctctcccatgcgtggtcgcgcatccagcgcaggccaaacgccaggcagcacgtattgatcctgcagcgtgatgggcatgagcattacctggctggggagccagaacgggaggcctctgtcggcgggcaactgcctttactgcccgcaggttgccacctgcacggcatctactttcactcccgacccttgccgggcctgtaccccgatcaggaagcctggctgttcaagcatttcgtcagccccctggagttggcgcagcgcatcgcgcaatttcgccagtacagccgtggtgtgcagtccaccctcggcgcatcactgtatatccgtgtgcgcgatgaagcgatcttgcgttatcgcttctccggctcagccgccgaatcccggttgttcacccaggccgccgacggcacggtagaggccgatgagctccagtccaaactgcactcgggcgtgttgctgacccgcgattttgtccggcaagtggccagggccggtgagttgacggtggagaaaaccagcgcgttgtgggaccgcagcggtgcggtggacgacacgtggacgccttattcgcaggttgtcttgccggcattgagcgcggcatttctcaccgccgacgacgcggcgctccatgcccaccggcgtatcggcaggcgccgcgagcaggggctcggcgggctgatcctcaagcgcggcgatggtcgcttcgtggtgaccgagccgctgccagccgggccacgcccatttgccttcgccggtgggtacccggtggaccggcagaaacagccgatcattctgcatcccgaccaccatttgcatgggcgctacgcttcgcgcacggcgctgtcgctgaccgacccggcccaggcggtcgagcgcaaatggacccgccaggacaccgagctgaatgcgcagatgttcctggcagacgacgttgccgatctgttggcaaccgggcaagtcggctacctgtcgggtaccgaggactgcctgctggccctggccccttcgaccaccactctggcgtggcgcaagcaatggtccagcgagacggcgggcatgcgcagtgcaatcaaccagcgcctggaagagggcaaggtcaagcctgccgatgttgtacggaccctggccgaagcgggaacgctgcgtattgtgctcggcaatgcgttgtggggcccagccggtttcgtcgaggtggactggggcccttgggtgcgggcgctgacgttccagcgccccgcgaccgtcagccacgggccgatcttcgaaagcgccgatgcggccgcgcgcgaacgacaccgacacgccgcccattactacggtgacgatcatgtcagccgttattttgcgttcgtcctcaagcatcgccagcgcgaagaatatgtcgccagcgagttggtcccggtaacccgccagtcggcgctgctgtccttcacccggttgtacggcggtgcactgcccgagggcttcgactgccacagcctgtactacaacaaaccctgggtcggcaacggcacccgtggctggctgcaacggtttttcatcgaaccggaagacttgagcgaggcgctgtttcaggctcgcgtcaatgcgttgttgtcgcccctcggtgcgccggtgtacatcgcggtgccggacggtgcgctgctgcgttatcagtcgccgtccacccaaggcctgttcgaaaccaacagcatcggggacagcgcggcgacggtgcgcgccaagctcaatgtcggcaccctgacgccgttgcagtttgtgcgcaatgttgcgatttccggtcgcctggaggtcgtccaggccagcccctgctgggaccgcgaaggcacggtcacggggctgtggacgccctacgcgcagttgctgcggcggcgcctgagcccggcgtttgtgtcgatggacgatgccgcgctgtacgtgcgtcgccgtgtgccgacgagcatcgaacacccctacggcgggctgatcctgcggcgcgaagacggctggtttttcgccaccgaacctttgcgggtccccgatgacagcttcgacctgaaatggatcttccccgacgaattggcctcccgtggcgagcatccgccgcgcactgtgccggtggccagttactacgcaaggccggcggaacagtggccgttcatgctgtcgcccacgcagtcgcaggtgtacggcaacctgttttccacccgtgcgctggcgcaggtgttcctgaccgagcgggcgcgcatgcatcactactggctggccgccgatggcgcgttgcttcgtttgaacacgcgtcccgaggaaaaagcgccgcttgtgaccatcgccgacctggtgacacgcccgcgcaatccccatgactggctcaacggtcggctcgaacgcatgctgcgcgagggcgagttgacgcccaccgcgtacgtcaaccgcattgcccagaccttcgccttgcacgtggtcagaggcagcgcgctgtggggcagcccaggcccggtacgcggctggcaaccctttgcgcctgtgccgccggccaacggtgcctatgtgcaggcgttccacgatccggcgtgcagcccggtgcatgtgcaggccgatgacgctgtgcgctacgcccatgaactcgcgggggcgcgtggcgaattgcagttcggctatgtgctggaatcgatcagcaacgggcatttcatcgcgaccctgccgatcactgacgccggcgccaacctggcgcatcggcgggtattcagtgatgccggttaccctcatcgctatgccttgggcggcctgtacctgtgtgcaccgcaggtgtccgaggtggtgccgagcgcgcccgcacaggcaggcgacggcgtctatcaagggctgtttttgccgtcccggctgatcgaggcgatgtaccaggtaacgaccacacaggaacgccctgcgttgcctctttacctgtcgtgcgcggatggggctctgctgcggttcgtggtgcgcgaccctcggtttatcgggtatggcgatgatgtgaagctgcgcctgcggctgctcaccccacgtgacttcatccggcgcatggcggcggccggcgagctacggatcctggtgcccagcgagcattggccggggaccggtatcgtcggcgcagactggcagccgggacgctctcgtggggtcgaaccggcgggcgacaactaccgcgcattggggccggtccatgcgcatcaagatgacgcggcggggttcgtccacgctcgcgccgggcgtttcacggggcaacaggcgatcagcgcgttgctggagagcggcggggtgatgggcaagcatgtaccggtgctggagctgccggaccatggtttcccttcggcgacggcagcgcggttatttgtgacggggccgtggcccgcaggcttgcaggtgcgggcggcgcatctgctgttccatgccgggctggatcagccgcagatgggcgtcgagcacttgtatggcgagtacttcgtgagctttcgtgaactggcgtactacattcattcgctcaaacagcagggcctggcgatcaacgggttttacctcaccgcccgggacggtgccttgctcggttatgcgccgcgcttcgaccaggccgagtacaacctgctggcaaccaccggcaaatggagcgccgaaggcggctacacgaggttcgcgccagacccctcacacgtgttggccgaactggcgcgcaccggccggttgcgggtactgcacagtggtgagttctggaccctgcgcggcgcgctgggcatggacctgaagctgcccggcagccccggcgggcgaccgtccagggacgaactctgaggcggtcagcgccggcgcatcaaaccgatgaagaacaatccgccaatcgccgccgtggccacgccgatgggcaggtcttcgggggcgatgagggtgcgtgcggccacgtcgacccacaccaggaacaagctgcccagcagcgcgcacaccggcagcaggcggcgatgctcggcaccgacgagacgtcgggcaatgtgcggcaccatcagcccgacaaaaccgatggagccgctgatggagaccagcacaccggtcatcaatgaggccaccaggaacaccttcagccgcacggtacgggcgttcaggccgagggtcacggcggtctgctcgccggccatcagcgcgttcaacgggcgcgccatgcccagcagcaccagcagccccagcagtaccgtcaacgccggaatcgccagcagctcccagcgcgccaggccgaggccgccgagcatccagaacatcaccgccgaggcggcgcgatggtcacccatgaacagcagcagattggccgccgccatcatcacaaacgacaccgccacaccgcacagcaacaggcgatcgctttccagccggccgttacgactggctacggccaacaccaccagcatgctcgccaatgctccgataaacgcggcgatgggcagggtcagcaggccgatgacttcgcccacatgcagcaccacgattaccgcgcccagggtggcgccggacgtgacgccgagcaggtgcggatcagccaacgggttgcgcgtgaccgcctgcaacactgcgccgatcaacgccagcccggcgcccaccagtgcgccgagcagcatgcgcggcacgcggatcagccacacgatatgttcctgcccggccggccaattcacttcaccgatgccgagcgccttgtacagcaggattcgccacaccacgtccaccggcacccgtgccgggccgaagcccagcgacaggacgcaggagaccagcagcaccgcgccaagcgcggcgagcagcagcccatagcgacgggtgatcattcgccgtggaaccccttggccagggtttccaccgccagcacgttgtcgatacccggcgtggcctgcacgtaagggatcacgataaagcgctggttgcggatcgcatccaccgcttgcagcgccgggttgtcgagcaggaattgctctttctgttcggcagtgacttcgctgtagtcgacgatcacgatcacctgcgggttgcgctccaccacggtctcccagttgacgcgggtccaactggcctcgatgtcatcgagaatgttgcgcccgcccgccgcgtcgatcagcgcctggggcatgcccaggcggccggaggtcatggcgcggtcttcaccgctgtcgtagaggaacacccggggcttgtcggcgggcaggtctttttgtacctcggcgacctgcgcctgcatctgcgcgatcaaggcattggcgcggtcctgcacatcgaagatcttgcccaggttgcgcaggtcgttataggtgtcttccagagtcgcagccgggcgcttcatcacgaaggcacaggattcggtcagctcatacacgttgatgcccaagggttgcagcgtgcttggtgtgaggtcgccgcccacacgcatgccgtagtcccagccggcgaagaagaaatccacgttggcgttgagcagggtttccaccgaagggtacttgctcgccagctccggcaggccgtcgagcagcccggccatttccggggtgaccgacttccagccggtgacgccgctgtaaccggccatgctcggcttgaggccgagggcgagcatcatctgggtcatgttgatgtcgtggctcaccgcgtgtttcggcgcttcctggaaggtcacgtcgcggttgcagctcttgatggtaaccgggtagtgggtcgctgcggcgagtgccccggcggtattgaacagcaaggtaatggcaagcagcgaacgcaggatcatggttgggttatccaggtgattcgggggtagccggacagcgggtgggtatcgatcaacgcctcgacgccaaacacatcgcgcagcagttcgcgggtcagcacctcatggggcgtgccgttggcgacgatgcgcccgtggttgatcacgtacaggcgatcgcagaaggcggcggccaggttgaggtcgtgaatgctcgccagggtaccgatgtgcaggcgcttgaccaagcgcaacagctccagttggtaacgcgggtcgaggtgattggtcggctcgtcgaggatcagcaattgcggctgctgggccagggcccgggccaggatcacacgttgtttttcgccgccggagagagtggcgaaggcgtggtcctcgaagccttgcatgccgacggatgccagcacctgctggatcaactgccggtcgtgcagcgtgtcgccgtcgaacaggcccttgtgcggcgtacggcccatggcgaccacttcatcgacgcgcaggccgaaggcatccgggaactcctgcaacaccacggcgatgcgttgcgcgcaccacttcgaactctgtttccacacgttctgatggtcgagcaacacgtcgccctgcgccggtttgctgaaccggtaggcgcagcgcaacaggctggtcttgccactgccgttaggcccgatcaggccgacgaactctcccgcaccgacctgcaggctggcgtcacgcagctggaaccggtgatggcagtggtcatgccccggcggggtccaggccaggtcggtgagggtgagtgcggtcatcagaaggtgtagtccgccgtgacaaagaacgagcgtggttcaccgaggatccactgctggccgtcgttgtattggctgacggcataggtgcggtcgaacaggttgttcaactgcaggcccagggtggtgttgcgcagggctttccacgatacggtggcatcgaccacggtgtagctgggcaactcgttctggttggccatgtcggcatagcgtgcatccacataacgcacaccggcgccggcgcggacattgtcggtcaccgccttgctcaaccacaggttggcggtgcggcgcggcacgtccaccgggcggttgccgtcgcgggagacttgcacgccgttgacgtcctgtttgaagtcgtcgtattgcgcatgcacgatggccgcgttggcttgcagttgccaggcgtgtggcagttgcaggtcgaggctggcttccaggccacgggaggattgctggccgacttgctgctgcaggctcgggttgcccggcacgtcggtgagcagtttctttttgacgatgtggtaggcggccaacgtccattcaccgcgctggtcccagaaggcttgcttgatgccgatttcagtctgcttggcggtggacaggtcgaactgctgctggccctggctcagggaaatcaggccaccgacgccgtcggtgctggtggcgtactggccgtagaccgaggtgtcgggcgtgatcgcgtagaccaggccggccttccagttattgccggtaagggtcttgtcggactggctgccggtgcgcagttcttcgcggtcgatgtgcgcgtagtcgcggcgcaggccggtgatcagcgacagttggtcggtgagttgcaggcggttttccgcaaagccggcaacggttttggtggtggtggcgaacagcggcttgaacgggtcgttgctggcgaactggcccggggcggggtggttcacgtcgatgggttggccgctggcaaaggtgtcggtaaacggcgagttgctggccaggcggaagcggatacggttgtattccacgccggtcacggtctggctgtcgaggccgaacaggctgtgcttgaaggtgaaggtctggcggtcgccgacctgttcctggttgtgcttgatgccgtagttgccgctgcgggtcagttggccgccggtgaagttgtagttctcggcgttctgccagcgacgctggtttttcaggtaatacagctcgttggtggcgctgacgttgtcgttgatctgccactcgctggtcaggcgcgtccactggtcgttgtagtgctgggtgtcgttgctgacgttgtagttcttgtcgcgcaggcctttgtgcaactggccattgatcagtggtgtgccgaagtagttctgcgggcgctggtcgccgtagtcgctggcgaaggtgaagctcaggttgtctgccgcctgccagcgcagggcaccgctgacgaagtcgctgctggagtcgccacggtcgataaaaccgttgctgcgcaggcgattgaggttcaggcggtagctcagggtgtcggtcagcgagccgccgctgtctagggcttgttgctggcgatcgtaggaaccgtagccgaggcggatgtggttttcgatcgcgccgtcgaagggctttttcggcacggtgttgatcaccgcaccggtggcgccttcgccgtacagcaccgaggccgggccgcgcagtacgtcgacgcgctccaccgaccaggtgtccaccgggaaggtcgaggtgcccatgcccatgtacatgcggttgccgtcatacaactgcatcaccgagccctggccggtaaaaccccgggccgacaacgaggtgccgccgtcgcccggcgtgccggtgcggctgatgccggtggcgcgggaaatcgcgtcctgcacactggcgtcgccgcgttcgcgaatctgcgtaccggtctggctctcgacgctgccgggggtttgcagggccgtgagattcaggcgcgagccggcggtggtcggggtcttgaggtcgacgtgatcatcgtccacggcaggtgcggtgacagggctggcgggcagggtcagggcctgggcgctggtatgcagggcgagcaggcacaggccggacgcgaggtacttgttcatcgggtggaaaatcttcttggcggcagtgctcgccgctgggcgcggcgagctgaggtatgcagtaagtgttataagttaacacttcctacgtcgagggtgaaagcccgcgtaagactacataacgcctctatgtggggcatctcgcctatttcatgtcgaacctgaggcagcttcacgttgtgcgaacagccgcgacagcaccaggcgatccaacacccacaccacgatcaacgacgcacccaccagcgggaaaacgatcgccagcccgagcatgatcaccatcgcggttttccacttcggcaggtcatggcgcagcggcggaacacccagcccgcccaccggccgacgcttccaccagatcaccacgccgctgaccgcgctgagcaggatcatcaggcagatcagcagcacgatcagctggttgacccagccgaacatcttgccctcgtgcagcatcaccccggtctcggtggcgcgcgccaccaggttgtagtgctcccagcgcacatcggcgaggactttgccggtgtactggtccacatgcaaggtggcgtcgttgcgtgggtcgttggcgaacaccgcgatggtgaatacaccttcggcggtggtgggaaaggtgatgctgtagccgggctcgacatggcgcgcgttggccaggtcgaccacttgttgcaggcgcaacgcaggtgcagccggcgcagcgtgcagggcgccgtggttcatgtgctcggcgtggtcgccggacatcggcatcggcgtgttctccatggcccacggcacggtctgttgactggctgtattgaggctgcgcgcctgttggtcggactgcggcacgttgttccacatcgccgctggaaagcgattccacagctcggcgtattgcttgccccagaagccggtccaggtcatgccgctgagcagcatcaccagcaacagcgaggcgccccagaagccggtgaccgcatgcaggtcacgccagagcacccggccacgggcagtgaagcgcggccacaatacgcccgccgatgatttgccacgcggccaccataggtacaggcccgacaccaccagcatcacgccccaaccggcggcgagctccaccaggcggtcgccgaccgtgccaatcatcagctcaccgtgcagggcgcgggcgatggcttgcaggttgtatttggcatcctgttcgccgaggaccgtgccgcggtaggggtcgacaaagaccgtcacttcgcgcgcgttgttatgcatcacgaactgcgcgctgctggtggcgtcggcggggggcaggtatttgctgatcgcggccttggggtaggccgcctgggcgcgttgcagttgctcgtcggcgctcagggcgtgcgcggcgctttgcaccttgagcaggtcgccgtacatcagcgggtcgagctggggtttgaacaggtagatgatgccggtcagggccagcagcaccatgaaaggggcgacgaagaggccggcgtagaagtgccagcgccaggccaggttgtagaaggaaactttttgagtgctcatcattgggctccgcaaggctttgaattttttgtgtctggttggccgtcatcgggggcttgcccccgatgctcctagaagctcatgtcgactttggtccagagcgttcgccctggctccttgatggcttgcgggtcggtggccgggtagccgaacccggcgttgccggccaggttcaggtgctcggcgtaggccttgccgaacaggttgtcgacgccggtgctgaccttgaagtgtttgttgatgcggtacgccgcgttcagcgagaacacgccaaaaccgccgctcttgtcgtagtccttgccgaccacgttgcccttgttggggtcgatgcggtgttgcgccgccaccacgcgccacaacgccccggcgctccagtcgtcttcgctgtaggtcaggcccaggcgtgcatccagcggtggcatttgcggcagcgccttgccgtcgctgctgttcttgccccaggcgtaggcgagggtggcgtcagccttccagttgcgcgtcagcttgtacgccgcgcccaattcgccgcccatgatgcgcgcgtcgacgttgcgggcctgggaggtggtacccatcatcccgggcctgtagtcgaacaggatgaagtcctgtacccggccgatgtaacccgaggcccaggcttccagatcgtcggctttgtactgcgcgccgaagtcgagctgggtggttttctccggcttcacaccgtcgaaggcattcaccgaaccgaccgcgccggtgttgggcgaaaacagctcccagtaatccgggaagcgttccgaatggcccaggcccgcatagacggtggtggggctgtcggccaggtcgtgttcataccgcacgaagcccgatggcagggtgtcggcgcgggtgtcgtcggcggtcgggttcgggcgggacatcatccccgagccgctggtttggcggaaatccttggccgaggcgcggtccaggcgtgcgccggtgatcaggcggtcgcggtcggcggcgtaccaggtcagttcgccgaacacgccgtagttatggaagttggcgtccttgacccggggcaagtccttgtaggtgtcgatgcccatgctgctgcgctggcggtgttcgttggtctgcgcgtcgaggccgctgatcagttgcacatcggcccagcgccaggtggccttgatccgtgcgccgagggtgcgccggtcgacgttggaggccatcggcccagccatcatcccggtgccggacggtgtgcgcaggctgtagttgtccatcacatggtcggcgtagttgtagtagacctgggcctcgaccttgtccagcacctcgccgatgttggacttttcaaagcgcagcccgaggctttcacgcaggaactgcgaaccgtccataccgcgcccggcgtaacgcgcttcgccatcgccacggccggcggtgagttccagcagggtgtcggcgtcgggggtgaagccgaccgccacatcaccgttccatttgtcatagcgcgaggcgacggtgtcgttgttgccgtccttgtagtcatcggcgtgggcctgattgccgatcacccgcacatagcccagcggcccgccggcggcggcatcgatgaccttgtcgaagcgcccgttggaaccggccagcacactggcgttgaggcgtgtgcccagctcgccgaactgctccggctcgcgctcgaacaggatggtgccggccgacgcgcccgggccccagagcacggtttgcgggcctttgatcacggtgagcttgtcgtaggtctccggcgagatgtacgaggtgggcgcgtccatgcggccggggcaggcgccgagcatcatgctgccgttggtgaggatgttcagacgcgagccaaacatgccacgcagcaccgggtcgccattggtgccgccgttgcgcaccagggcgaagccggggatggtcttgaggtagtcgccgccatcgctggcgggcaccggctggcgtgggtctttggggttggtgataacggtcagcgctgagctgggggcgatcgccgtgatcacggtgggcgtcagctcatgttcggcgtgctcgtcggcctgagcgtgaggtgccagtagcgcaccgcacagggcggcgagcacaggggtatatcccaaacgggtgtcagcagaaaacctggacatgacaaattccatcaatcagtcgtaaacaacacggccagcagcctgcggctgtctgtctaaagtcggccgggggtgaagtaacggtgttaagtgcttacgaagcgatgggcggcgcgcggctgcgggcgccggggaagatgctctgccgggcatggcccaggcgtgtggcgggggtgagggcgttggccggcggcgggctgctcagggtgaaggttgaaatgccgccgggcagggcggggcagctatagagcaggtcgcaatagccgcacttggaccagagggcgtggtgttcgtcaggtgccttgggttgatgggaggcgccgtggtccatcggcatgtccatcgacataccggcgtgatgatccatcggcatcgcttgggaaatcagcggaccgataaagatcatcagcatggcgaacaggctgatccaactgccgcttctcaggcgggcgtgtggagacaacctggcgcgaggggcgcccatcgcgtgtcagcctattgggcgtgcttatgctcgtgtgtcgccatcggtggcaccttctgcaccgacacttccacctcgaccttgccggccttttcgaaggtgagcgtcagcgggaattgcttgccgtcggccaacaggctgcggtccttgaggcccagcagcatcacgtgatacgccatcggcgcgaaggtcagctcgcccttggccggtacggcgacgctgggcacctgctgcatcttcatcaggtcgccctgcatcacatgttcatgcagctcggccttgtctgccactggcgtgtcgacgctgagcaggcggtccggggtctcaccggtgttgtgaatcacaaaataggcggcgacggtcggcgcattcggtggcaactcctgggaccagggatcgctgaccagcaggtcgccagccttatagtcgtcggcattggcagcactgaacaccggcagcaacaacgcagccagaagcagggatgatttgagcatggcagttctccagaacggttctaaacgcagttcaattgcgaagaagatcagaccgttggagaggcgcgggggttgaggctcggccattgctggcgcagggtggggctttgcagctggggcggcggcaagctctgtgaagtattgaattgggtgagatacaactgcggcacatgccccggcaacgccaccaacggcgccgagcccgagcagcaccagcaatgctgcatggtggaatgatcgtcctgctgctgcgccggaatctccagcttgcccagggcgatggtcttgaggctcgcgccattggaggaacagaaactgccccacagcaattgctggaccgggtcgctggactgttgcatcgcgctggccatcggcatggcaaaggcgttgaacagcactgcaaggcaggcgatccaggcaattgcaaagcgttgacgggccatggcggacaatccgtagggttaaacgatcaggcgggtatttagcctgatcgtaggggataagtaaaaaggggcggtgtggtttggtgtcgcagtgacgggtttgaggatagacgggtaatcgagtggatgccgatcttcaaagctgcacagttcaaatgtgggagggggcttgcccccgatggcggtgggtcagccgctgatttgttgactgagctgacgctatcgggggcaagccccctcccacatttggccggtgttcgacaatgaataggggcaagcagaaatatccgacaggcctttaaggttgtccctaggacactcaaactctagtctccgtacaccgctgcaaacgcagcggtcgggcgtcgcggcccggacttctccagacgccgaagcgtcattgcctcctttcagttggcgtttttttatcgtctactgtgcggcgctatggcggctgtgcgcgggataccttcgggtatgccggtgttctggagaatcggtccgcgaacctgcgtacagctgccacccccatcgcgtcgcggcgatcagtggcagctcctctattacttctccggagcttcacaatgatcaaacccaccccaaatcccccccaccggctattcaccgtagccgacggcttcagcaccgaagacctgttggtcaatctcagcgaaacccttgcctcggcgaatgcgctgagttgcgatcttgcgtttgacctggaaggctcgaaacgagatgaattgctcggcgttgcgcagttgattgagctggcgctgctgctggctgatcgtgtgcatgatggtgtagggcaaacgaaaaacgctgcgtgatgatgcagttctaaaggtgggagggggcttgcccccgattacggtgtgtcagtctatacatctgtgagtgatctaccgctatcgggggcaagccccctcccacatagaatcgatggtgtttagagagtggtgattgcctgtagaaccgcaggcacagtagtgaattctcgatccactgctgccaacaccggccgcttcaacaccaacaccggcactccaagctcccttgccacttccagcttcggctccgtcgcggtgctgccgctgttcttgctgatcagcacatcaatgccacgccgtgcgaacaacgcacgctcatcttcgatcaagaacggcccacgcgcgccgatcacttcacagcgctcgttccccggatacacatccaacgtgcgcagtgtccagaactgctctggcgggatctcatcaaggtgctgcaacggctctcgccccaacgtgaacaacggacgcttgaagggtttgagcgcttcaatcagcgaagcccaatcactgacctcgcgccaatcatcccccgcctgcggctgccacgccgggcggcgcaaggcccaacatggcacgccgctcaactgcgcggcctcggcagcattgcggctgatttgtgctgcatacggatgggtcgcgtcgagaatcagactaatcccctcattccgtacaaaccgcgccaacccctcagccccaccataaccgccgacccgcacctggcaggtcaggtcggtgggcacgcgcccaaccccggccaggctgtagatatgttccgggcccaatgtacgagcaatggccagcgcttcggtcacgccgcccaacagcaggatgcgtttcatagcggcttgaccacttccagcaaggtaatcggcaacgcctggcgccatgtatcaaactcccccaacggctgcgcctgagcgacatggatgcgcgtcagttcgccgccatactgcgcgcgccagttcatcaaggtcatttcgctttgcagggtcacggcgttggcgaccaaccgcccgccagggcgcaggtgttgccagcaggtgtcgagcacgccttcgcgggtcacgccgccgccgatgaagatggcgtctggtgcttccaggccaagcaatgcagcgggggccttgccgcgaatcagttgcaggccgggcacgccaagggcgtcgcggttgtgttcgatcaggccttggcggccttcatcggcttcaatcgccagcgcgcgacaactgggatgcgtgcgcatccattcaatcccaatggagccgctgcccgcacccacatcccacagcagttcgccgggcatcggcgcaagacgggcaagggtcatggcgcgcacatcgcgtttggtcagttggccgtcgtgcttaaaggctgagtccggcaaacctgcacgacgcgacaggcgagcagtatgggcgtcggccaggcagtcgatggcgacgaggttcaaatcggcgaccgaggtgtgttcccacgagtgcgccaacccgtcgatgcgctgctcatccgcgccgcccaagtgttcaaacacagacaaacggctagcaccgaacccggattcgcttagcagcgaagcaatcaacgccgggctgcgcccgtcattactcaacaccaacaaccgcaccccactggccaggtgcgcattcagcgccgccaacggccgcgccaccaccgacaacgtcaccacgtcctgcaacggccagcccaaccgcgctgccgccaacgataccgacgaaggcgccggcaagatcagcagctcatccgccgccacctgccgcgccaaactcgcccccacgccatagaacattggatcgccactcgccagcacacacactggctccccgcgccgcgccagcaccggctccagcgaaaacgggctcggccacacctggcgttcgccacggatacacaccggcagcaggtccaactggcgctgagcacctataatccgcgtggcgcgcaacagggcatgccgggcgttcctgcccagccccttgaagccgtcttctccgatgcctacaaccgtcagccagggcgacatatgaattccttgaacgacatccgacgggcaggcttttcatgccgccggacaaagcaggcataataccgcgcctttacccaccaaccggtagccccgtgaacccaacgcccgctgtgaataccttgcgcccctcggcctgtccggggttgctgcgtattgtccaggcgttggatggcggtatttgccggatcaaattggccggtggttcgatcaccagcaagcaagcccaagtggtggcagatgcggcccaggcctatgcgggcggggtgatcgaggcgaccaaccgcgccaacctgcagattcgcgggattggtgcccaagagcaggcattgatagccctgctactggacgcaggcctgggtcccaacaatgccgccggcgacgatgtccgcaacctgatgctcagccccagcgccgggatcgacccgcagatgctgttcgacacccgcccgctggccgatgagatcctcgccaccctgcaaaaccacccacgtttccatgaactgtcagccaagttcgccatacagctggatggcggtgaagccctggcgatgcttgagcatcaccacgacctgtggctgtcggccttcatccgcaacggccagacgctcctcgcgttcggcctggccggttgcccggggctggatgcgccactggccgccgtgccgctggagcaggggcatgcgctggtggtggccgtgctggaggcgtttctgaacattgccactccagaacaaacccgcatgcgccacctgcctgtggataacgtgctgagtcatttaaaccagccgctattgcctgttgatggcttcaaacgccagcccagcggggctttgctgcaccttggcacttatccacaggatcaaaagaatcagttttatgttgccgccatcgcacccttgggccgcctggatgcgacgatgctcaaaggcgccgcgcaactggccagcgagtacggtgatggcaccctgcgcttcaccccttggcaaggcgtgttgctgcccaacatcgaaaaaccgtacgccgtgaccgagcgcctggcgcaactgggcttcctttgctccatcgatcaacccctggcgcgcatgaccgcctgcaccggcgccagcgggtgcggcaaggccctggccgacaccaaggccgatgccgtgcaactggctgccttgcagcccggccatgacgtgcacctgtccggctgcccccgttcctgcgcggctgcgcacgttgcgccggtcaccttgctggcggtgagccccggccactacgacctctatttccgcgacgcagcccaacccggtttcggccggctgcacgcgcgcaccctttccattgaagcggcgggcgccctgttgcgcgctcgtccacggagcaacaccgatgattgattacatccgcgacggtcaggagatctatcgcaactccttcgccattattcgcgcggaagccaagttggagcgcattccggccgacctggaaaaactcgcggtgcgcgtgattcatgcgtgcggcatggtcgaggccatcgacggcctgcagttttccgaaggcgcgggcaaggccgggcgcgatgcgttggccgctggcgcgccgatcctgtgtgatgcgcggatggtctccgagggcgtgacccgcgcgcgcctgccggccaataacgcagtgatctgcaccctgcgcgacgacagcgtgccggcgctggcgcgggagctgggcaacacccgttccgccgccgcgctggagctgtggcgtccgcacctggaaggcagtgtggtggtgatcggcaatgcgccgaccgcgttgttctacctgctggaaatgctcgatgccggtgcgcctaaacctgccttgatcctgggtttcccggtcgggtttgtcggtgctgccgaatccaaggcgatgctggcggcggacagccgtggcgtgccgttcgtgatcatgcagggtcgcctgggcggcagtgcgatggccgccgccgcggtgaatgccctggccacggaggtcgaataatgccggcacgcggacgtttgatcggcctgggcgtaggccccggcgacccggaattgatcaccctcaaggcgctgcgcctgctgcgcgaatcgccggtggtggcgtatttcgtggccaagggcaagaagggcaatgccttcggcatcatcgaagatcacttggtgccccaacagaccctgatgccgctggtgtacccggtaaccaccgaggtgctgccggcgccgatgtcctatgagcaggtgatcagcgatttctatgacgccgccagcgtcgatgtcgccgcgcacctggatgccggccgtgatgtggcggtgatctgtgaaggcgacccgttcttctacggctcctacatgtacctgcatgaccgcctcgccgaacgctacgaagcgcaagtcatccccggcgtgtgctcgatgctcggcggcgcctcggtgctgggtgcgccgttggtgtatcgcaaccagagcctgtcggtgctctcgggcgtgttgccccatgaggatctgaagcggcgcctggcagacgccgacgcggcggtgatcatgaagctgggccgcaacttcccgaaagtgcgccaggtgcttgaagaactcggcctggccgagcgtgcgctgtacgtggagcgggcgaccatggccaaccagaagattgtgccgttggatcaggtcgacccggcgtcttcgccgtacttctcactgatcatcgtgccgggcgaaaggtggcaaggttgatgaacccggcgattgtcattctgggccagggcagcctggccaccgcgcgccggatccaacagctctaccccgaggcgcggatccacggtctggccgggcgcgttggaggtgctgaccagacttacagtgagttcggcacgaccttgcgccagttgtaccagcaaggcacgccgctgattgcgctgtgcgccgccggtatcgtgatccgcaccctggcgccgctgctgctggaaaaaggtgaagagccggccgtgctggccgtggcggaagacggcagcgccgtagtgccgctgctcggtggccttggcggtgtgaacgtcatggcgcgcgagattgctgccgcgttgaacgtggccgctgcgatcaccaccagtggcgaactgcggtttggcacctgcctgctcaacccgccgcagggctatgagctggccgacctcgagttgggcaagcggttcgtttccgacctgttggccggtgaaagtgtgcgcatcgaaggtgtagcgccgtggctggatcaggccaacttgccgcaggatcaacaggcgcgcctggcgattcatgtcggcagtgccgagcgccaacccaccgccaatgaattgctgatctacccgaagaacgtcagcgtgacctgcaaacccggcgcgcaattggccgagcgtgtgcgcacggcattgcatgaagcgggtatcgccgtgcaatccctggcgtgcctgctggccagcgaaacgcagatggccgaagcgtcgttgcgtgacgcggcgttggaactgggggtgccgctgcgttttaccggcgtttcccaggacgccgatatcgtggtcagcgtggctgaacagccgctggacttgtcgcagatcggtcgtgttcgtggccgccttgccgtgatcggcctgggccccggtgccgccgagttgatggtgccagcggtgaaggctgaactggcgcgttgcaccgatgtgctgggttacgagacctatgtgcgcatggccggcccgttccgcgaggatcaagtgcaacactgcaccgataaccgcgaagaaatgcagcgtgcccgtcacgccttcgagctggcggcccaaggccgttcggtggtggtggtgtcgtccggcgacccgggtgtgtttgccatggctgccgccgtgattgaggcgttgcacgaatccagcgacccgacctggcatcaggtcgacctggagatcctgccgggcgtctcggcttcgcttgccactgccgcccaggccggcgcaccgttgggccatgacttctgcgtgatgtcgctgtcggataacctcaagccctggtcgatcatcgaaaagcgcctggacctggcgtcccaggccgacctggcgctggcgttctacaacccgatctcgcgttcgcggccttggcaactggggcgcgccctggaaatcgtcgccctgcatcgcacaccgcaaacgccggtggtgctgggccgtgatatcggtcgcccggggcagagcctgcgtgtcactacgttggggcaactgacgccggagcaggtggacatgcgcaccatggtgctgatcggctcgtccaccacctgcacattcccccgtgccggtgggggtgaatgggtctacacaccgcgctggtacggtgaaaaacccgcctcctgaaaacggcctgtcgtctgcctgaaagcgccgaattgcccagggattttcctggcgttgttcggcgctttttcttttttttgcgacgaaatatggaaactcacccgtgatgccgcgttattgctgggcgttgtggttcaacgggttgcgccaagggatttttatcgtctggaaagcccatcggccagtgaactagggtggacacaagccccacgttggggtgcttgtggagaatcaaaatggagcgacatcacagacggatcaacagtacaaaaaggcgcaagttgattgccgcctacaaattaccgggcgcgtcaggcaagcacgcgtctgtaccgctggacaccgaagatgacttcaatgcggcggtggtcaacaacagtgtgatttcgtttgccgaaggcctttcgggtctgaaccgagagtacgtgcgtaaaagttatctgctggccagcagctacgtcagcgatgtgttgaatgtgcaccgcggtaccgaggactggtacgacgaattcatcaaggtgatggtcagcctggggtggctcccggtgcgtagcagcttcgaacgggtctcacgttcgggcaaggggctgaccgtgcagttggcggcgctgaaccttattgccacgctgttggcttccacgtccttgtccgcgccgctgcttagcgtgatgccgaaactggcggcggatgcactggaggcgttgaagcaggcgccggcgtcttttgaattgttcaagcgcaacagctcggtgcaccagggcggtgatttcggcctggcatcctgtgccgaaaccgatggcgaattgacgatggtgctggtgacctacagcactcacggcgtgagcaaacaggtagggctgcccttcctggagtgggacagttcctcgtgcgaggccttcagcgggcagacgtgcctggtgctgaatacctcggtggtcaacgaaaagacgatccaactgatgcgcgagagcgcgggagacaaagtacaactggcgattgccaaataccggatctaaggcaccaggtagccgcgtaccccggtgaagatgatctgcgcggccagggcgcagacgaacaggcccatcaaccggctgacaatctgcaagccctggtcaccgaggatgcgttcgatacggttggacaggtacagcaccacgcccaccgtgaggctggccagggcgatgctgaggatggcggtgagcttgtcatcccagtgcggttggctcacgcccatcaccagcagcgcaccgatggtgccggggccgacggtgagtgggatggtcagcggcacgatggtcacatcctgctgcacgttgtcggtctgcaccgccgacttgccctgggccatgcccagggcggaaatgaacagcacactgccggcgccgatgcggaaggcgtcgacggtgatgccgaacacactgaaaatcacccggccgaacaggtacagcaatacgctcgataccagggtcgccaacgccaccttccacgccaggcgccgccgctctttgctggaatagccacgggtcaggctgataaagcaggacagcacgaagaacgggctgtagagcaccagcattttcaggtagacgctgaataacacgtggagcatgggggcggctcgcaggaggaaagtgtggagagtctatcaggcgccagagatcaaatgtgggagggggcttttgtggtgagcgggcttgccacgcgctgggctgcgaagcagccccaataagaacgccgagttatgtcaggcactctgcggcgtttggttttagggccgcttcgcgccccagcgcggggcaagcccgctcaccacaaaaaccagttcctacaggagggcagcgtttcaagttaagacggggcgtgctcgggcctttgctgacgctgcgccacccaaaactccaccagctcgcgcaactgcgacaactccaccggcttggccatatgcccatccatcccggcctggcgcgcacgctccttgtgttccgacagaatgtgcgccgtcaacgccaccaccggcgtgcggatgcgctggtggctgacttcccaggcacgcagctgctgggtcgccgagaaaccatcgaggatcggcatttcgcagtccatcaacaccaggtcataacgctgggccttcattgcttccagcgcttcctcgccattgctggcagtgtccgggctgaggttgagcttgccgagcatgccgcgaatcaccttggtggagatgctgttgtcctcggctaccaggatgcggaaatccgtcggcacggtgatggcggccggagcgctgaggaccgggcgtggcagcacgttgcctttgctgcgttgggtcagttcatccgccagggtggtcttgagcgtgtagccggccaccggtttggcgaggatgcgcttgatcccgcaattgcgcgcgatgatcttgctcggcgcgttgctgatgccggtgagcatgatcagcaggatgtcgtggttcaggctcgggtcttccttgatctttgccgccagttgcatgccggtcatgccgggcatgttctggtccagcagcaccacatcgaagtaatcgcgcaggtgcgccttggtgcgcagcaacgccagggcttccttgcccgagggcacggcgctgacgttgaggccccaggccgaacattgttgcaccagtactttacggcaggtgtcgttgtcgtccaccaccagcacgcgcgcgcctttgagcgggccgtcgaggtcggaggtcgggtgttccaggcgttccgggtccagcggcagggtcagccacagggtgctgccctggtggctgccgctcttgatgccgaactcgccattcatcaacaggatcaactggcgggcgatgaccaggcccaggtggccgttcaaacgggtggccgagaagaaattcttgctgtgcagttcgctgtgcagcagggcatcgcgctcggcgggttccatcggcaggccgctgtcttgcacggcaatgcgcaggcgtggcttggtgctgcggtcgtccagggccaccacgatcagcacttcgccttcgtcggtcttttgcagggcgttttccagcagactcaacatggcctggcgcaggcgcgtcgggtcgccgctgatcacgcggggcacctggggctggataaagctgatcagttcgacgttctgctgctcggccttggcgcggaagatactcaggcagtcttcgatcagcgcattgaggtcgaactgcacatcgtccagttcgatctggccggattcgagcttggagatatcgaggatttcattgatcagcgtgagcagttcgttgccggcgctgtggatggtttgcacgtagtcgcgctgcttcaccgacagtggcgtacccagcagcagttcggtcatgcccaacacaccgttcatgggggtgcggatttcgtggctgatcttggccaggaactcggccttggccgcgatttcggcattgctcgccgccaggtcgcggctgaggctgaaacgcgcctcgacaatcgcacgctggcgttcgcccaacgccaggctcatcagcaggccgctgaggcagataaacgccagcagcgtgacgatcaggccctggggcgagaccatcgtcaggcccagcaacgccggcaggatgatcagcgtaccgatgttgaacaccaccatcgccgccacgaacaggcgtgccgggcggtagcctttctgccagtgataggctgagacaaacagcatgctcaagccggcgagggccaccagggcgtaggtgatgatgttcagcggcagggtgttgacgaacaacagcaacaggccgcacagcacgatgaacaggatgtccgccatcaacagcttgttcagcgggtgcgggcccaggggcatgaagaaacggtaggcaaacatcaaaccgcagggtgcggtgagcagcagcgccaggtaggcgcctggtgtctggattgcatgccagttcggcagccatggccctaccaggttgagcagcagcgccaggctgagcatcagcagcacttcgcacgccgccagccacaggctgctgcgcgagcggtggtaggcgaagcgcgtcaggttgtgcaggatcagcatcagcaggcagccgaacagcaggccgtagatcagcgtctgggtctggtcggcggcggcgagtacggctggttccagggtgatgtaggggcgcagttcgtgttccgagaccaggcgcaggtaaacctcgaggggcttctggctctggggcagcggcagcatgaagtcactgctgggcaacggtcgttcagcctggggctggcgtgtgccggtgctctgttgttccaccagggtgtcgccgtccagcacgtagaggctcaggtgcgacaggtccggggcgaatacccgcagcacttgttcgtgcttgccgggttgcagcttgaaacgtacccacaacgcaccgtccggttccgcggcggtaatgcggtccagttcgatggggctgaattggttggtgtagcgcgaggaacggatgtcgctcagctgcaggtcggcctgttcatcaagcaatactgcccagccactgccttgcgcggcggcctgggccgggaacaagcagagcagtgtcagcagactgacagtgaaacctatggcgatcctgagccagcgcacggcgaaatcccttcgtaggttgatgcacggttaactatgcgcgggtaggcctgcatacggcaagggccagaggcccctgcctagccgaacggatagctgcttactggttctcgccacgctcccgcgcaatggcgcgatagccgatgtccttgcggtagaaacagcctttccagtcgatcttcgcggccagcttgtaagcctgttgctgcgcggcgtcgacgctggcgcccatggcggtggcgcatagcacacggccaccggccgttacgacctggccatccttgagcgcggtgcccgcatggaacaccttgccttccagcgtagcagccgcgtccaggccttcaatcacatcgcccttggcgtagtcggcagggtaaccaccggccgccagcacaatgccgacgctcggacgtgggtcccactgcgcttcaaccttgtccagggcctgggccaatgcggcttccaccaacagcaccaggctcgattgcagacgcagcatcaccggttgggtttccgggtcgccgaagcggcagttgaactcgatgactttggggttaccggctttgtcgatcatcaggccggcatacaggaaaccggtgtacacattgccttcgtcggccatgccgcgcacggtcggccagatcaccaggtccatgacgcgctggtgcacgtcggccgtgaccaccggggcaggggagtaggcgcccatgccaccggtgttcgggccggtgtcgccgtcgccgacgcgcttgtggtcctggctggtggccatcggcaagacgttcttgccgtcgaccatcacgatgaagctggcttcttcgccgtcgaggaactcctcgatgaccacgcgggagccggcatcaccgaacgcgttgccggcgagcatatcgcgcacggcgtcttcggcttcctgcagggtcatcgccacgatcacgcctttaccagcagccaggccatcggccttgatcacgattggcgcacctttttcacgcaggtaagccagggctggctcgatctcggtgaagttctggtagtcggcagtcgggatcttgtggcgggccaggaaatccttggtgaaggccttggagccttccaactgggccgcaccggcggtagggccgaagcaatccaggccacggctgcggaacaggtccacgacacccgccaccagcggcacttccgggccgacgatagtcagggacacattcttttcagcgaagtcggccagttgctcaagggccagcacgtcgatagcaacgttttcgcacttggcttcaatggcggtgccggcgttgccgggggcaacgaagactttctggacgcgtgggtcctgggcaactttccaggccagggcgtgttcacggccaccgctgccaatgatcaaaacattcatttcaaaaacctcggatgacgcaaattcttgggaacactgtgggcgcttttctgtgggagctggcttgcctgcgatgcgggcgcctcggtgtaacaagtgcaccgaggtgatgctatcgcaggcaagccagctcctacagaagccagtgcccaccaggcaatgttggatcagtggcggaagtggcgcatgccggtgaagaccatggcaatgccggcctcgtcagcggcggcgatcacttcggcatcgcgcatcgaaccacccggttggattacggcggtcacaccggctttcgcggcattgtccaggccgtcacggaacgggaagaacgcatcggaagccattaccgaacccaccacctgcaaaccggcgtgctcagccttgatcgcggcgatacgcgccgagttcacccggctcatctggccagcgccgacaccgatggtctggcggttcttggcgtagacgatggcgttggatttaacgtacttggccaccttccaggcgaagatcaggtcgttgatctcttgctcggtcggcgcgcgcttggtcaccactttcaggtcggcgctgccgatcatgccgatgtcacggctctgtaccagcaagccaccgttgacgcgcttgtagtcccaggccgccgcgcggtcagccgaccactcgccgcaggccagcaggcgcacgttggctttggcggcgacgatggcgcgggcttcttcgctgacgcttggggcgatgatcacttcaacgaactgacgctcgacgatcgctttagcggtctcggcatccagttcgcggttgaaggcaatgatgccgccgaaggccgattcggtatcggtagcgtaggccagttcgtacgcctggcggataccgccttcagcgtccgggctcacggccacgccgcacgggttggcgtgcttgacgatcacacaggctggcttgacgaagctcttcacacattccagcgcggcgtcggtgtcggctacgttgttgtaggacagctctttgccttgcagttgggtcgcggtggcgatgcccacttcggcaggcttggcctccacgtagaacgccgcgctctgatgcgggttctcgccgtagcgcatctcctgggccttgatgaactggctgttgaaggtgcgtgggaactggctgcgaccttctgtgcttagggtttcagcggtctggttcacggtgcccatgtagttggcgatcatgccgtcgtaggcggcggtgtgttcgaacgccttgagcatcaggtcgaaacgctgggcgtaggtcaggccaccggccttcaggctttccaatacgttggcgtaatcactggcgttgaccacgatggccacgtctttgtggttcttggccgccgaacgcaccatggttgggccgccgatatcgatgttttcgatggcggtcggcaggtcgcagcctggcttgttgatggtggcttcgaacgggtagaggttaacggccaccagatcgatcggcttgataccgtgctcggccatgatcgcgtcatcggtgccacgacggccgaggatgccaccatggatcttcgggtgcagggtcttgacccgaccgtccatcatttctgcgaagccggtgtagtccgccacttccactgcggccacgccgttgtcctgcagcagtttgaaggtcccgcccgtggagaggatttccacgcccagagcttccagctcccgggcaaattcgaggatcccggtcttgtcggagacactgatcaaggcgcggcggatcggcaggcgggtagtctggtcggtcatttcaatttccatcaaaagcaaaggagtcagcaaaaaaggcgaccggttttacgcgggcgcctttctggtttgattgaatgcttacagcaaatcgtattgcttgagctttttgcgcaaggtgccacggttgaggcccagcagctcactggctttggtctggttgcccttgacgtagttcatcacgctttcgagcaagggcgcctcgacttcggagagcaccaggttgtacacgtccgtgacggaagcgccctcaaggtgggcgaaataattgtgcagcgccttctcgacactcccgcgaagggtctggccttcttcgctcggcgtgttgaggtgctgtttcaaattgacgttgtcgctcacgggtgttgttccactcactaaagtctcggtcatcatcgtcatgcggccaccccctctccgtcccctgtccccaggctcttgtaacgctcgctgaagaactcacgaacgttggcgcattgtgcttccgtatcatccaaacgattgaagtgggcgcgaaactccctggcgcccggcagggttgcgagataccagccgacatgcttgcgagcaatgcgtactcccatcacatctccatagaaggcgtgcagggcggccagatgctctagcagaatacgttccacctcgattagctccggtgccggcaacacttcaccggtacgcagaaaatgctcgatctcacgaaaaatccacggacgcccctgggcggcccggccaatcaacaagccatcggcaccggtggcgtgcagcacgcgccgggccttctcggcggagtcgatgtcgccattggcgaataccggcatcgataccgcctgcttgatcgcagcgatggtgtcgtactcggcttcaccggtgtaaaggtcggcgcgggtgcggccatgcaccgccagcgctgtaatgcctgcctgttcagcgatcttcgccactgtcaggccgttcttgttgtcccggtcccaaccggtacgaatcttcagggtgaccggcacatccactgcggcgacaacggcctgcaggatctcggctaccaactgctcatctttcaacagggcggaaccggcggccttgttgcagaccttcttggccgggcagcccatgttgatgtcgatgatctgcgcccccaactccacgttggcccgggccgcatccgccagcatctgtgcatcgccaccggcgatctgtaccgagcgcggctcgggatcaccttcgtggatcatgcgcatccgcgatttgcgggtgttccacaagctcatgtcgctggtgaccatttccgagactactagacccgcgcccaaacgcttgcacagctgacgaaagggctggtcggtgacgcccgccatcggggcgaggatcaagccgttctgcaatgtgtatgggccgatgcgtaccgccgacataggacttccctgttgtggggccggatcattagagttcgaaaaagggttggcatgatacccgctctcgatgactggataaaggctgaattggataaaatctgaacagttatttctttatcgccagcggtttggttgcgcaggggaaagtcaataacctgccgtcaaacctcaatgcatgaaccgattcactcgggcgagtggaagctcaggctgtaattcacggctttgttgcccggatcgaggatatccagggagatatggatcggggtttgtgatggcatttcgctaacgccggccaactcaccgctgaggtattcggcgggtttgaagcgacggctggcaatcaggttgccgttcaggtcggcaaaacgcagctccagcagcgggaagggctgggagaaggttgcacggttatagatgatcgcatccaccaccagcgccccggcgaaatcggggtggctgcgcaccaccaggttactgctcttgatatgggcgatatcgacccgcgacggcactgtgcaacccagggtggggcacagttgctggaaccacgggcgatacgcgtcctggcgggccaggtcgtcgaattggtaggcgatgtattggcctgcgaggccggcggcggcgatcaggaccagcagcagccagaccaggcgacggcccaggcccgtcgggcgtttgtgtgcgtagaggtgcagcggatcgtcttccaggtcctggagcaaatcgtcatgggcgctggtttcagcgcgtgggcgcttgcggcggggtggcaggcgatcttcggggtcggccgctttggtcagcggcgtgaacggtgggtcgatgtcgtcatcgtctggtgttgagcgcaggggtggctcatcgtcgagatcgtcggtgtggagcgacatggacggttcggtgcgctgcctggtcgcaggttctggctcgttttcgctgtcgtggaggcgctcttcaggcggctcgctgaacaggcttgccgcccatttctcttcttcggccttgacgctgtcgcggctggcgctgagaggctcgtccttttgtcgacgatcggcgcccgcatgccggcgttctgcgcccgggggcagggtgtgctgaatctcgcggcgttccagcttggccagttcttcgtccaggtccaggttgtccaggtccagctcttcggcggtccactgtttctggctgatggcgcgcggcgcctcggcagtggtctcgggctgcggcgccggcgcctggccgcgttgctccaacagctggcgggccgcattgaacacttgcaggcacgagccgcagcgcaccacgccacgggccacgctcaattgagcgtggctgacgcgaaagcgtgcttggcaatgcgggcactgggtgacgaaactgtcggtcatgcggccatccgattcaggcaagcgctcattctagcgccgacgaccgctgatgcgtacccagccatcgcggttggcgatcggatccagctcgaaatccttggcgtaggcggcggcgacgtcttcgccctgctcggccaggatgcccgacagcgccaggcggccgcccggcctgaccaggctcgacagttgcggcgccagcgccaccagcggcccggcgaggatgttggccaccagcacgtcggcctgtacctggggcagttgctccggcaggtagagtgggaatttgccttcaggaatgttgttgcgcccagcgttgtcgcgggaggcttccagggcttgcacgtcgatgtcggtgcccacggcttccttggcgccgagcagcagggcggcaatcgccaggatccccgagccgcaaccgaagtccagcacgtggctgtcggtcaggtcctggccgtccagccattccaggcacagcgcggtggtcgggtgggtgccggtgccgaatgccaggcccgggtccagcagcaggttgactgcgtcgggctcgggcgcggcatgccagctcggtacgatccacaggcgctggccgaaacgcatcggctggaagttgtccatccagctgcgttcccagtcctggtcttcgatgacttcgctgtggtgctctggcagcgggccgccggtgagcagttccatatgggccagcacggcgttggcgtcggtgccgtcttcgaacagggccagcaggtgggtgtgggaccacagcggcgtggtgttgagttcgggctcgaagatcggttggtcttcggcgtccatgaatgttacggagacagcgcctacttcgaggaaagcgtcttcataggtttcggcttgttctgggctgatggcgagacggacttgcagccaaggcatggcgggcacctttgaaaaaatgagtgtgcagcggggtggggctgcgaaagggcgcaagtttacgcgagcgcacagaagaagacgacatacaccgatcaaatgtgggagggggcttgccctcgatggcgatggatcagacacagctgcatcaactgacactccctcatcgggggcaagccccctcccacattggaccctgtacatccagaaattccagggcccagacacaacaaagccgcccggaggcggctgtgttgtttggagcacttactggttggccagcttgtgttccaggtagtgaatgttcacaccaccttcgcagaagccttcatcacgtaccagttcccgatgcagcgggacattggtcttgatgccatccaccacgatttcatccagggcgttgcgcatgcgggccatggcctcatcgcgggtggcgccccaggtgatcagcttgccgatcaacgagtcgtagttggacggaaccttgtagccgctgtacaggtgcgaatcgacgcgaacgccgttgccacctggagcatggaaatgcttgaccaggcctgggctcgggataaaggttttcgggtcttcggcgttgatccggcactccagggagtggccgtggatcttcacgtcgtcctgggtgaaggacagcacgttgcccgcggcgatgctcagcatctccttgacgatatcaataccggtgaccatctccgagaccgggtgctctacctgcacgcgagtgttcatctcgatgaagtagaaacgaccgttttcgtacaggaactcgaaagtacccgcgccacggtagttgatatcgatgcacgccttgacgcagcgcgccaatacttcctggcgggctttttcgtccaggcccggtgccggggcttcttccagtaccttctggtggcgacgttgcagcgagcaatcgcggtcacccaggtgaatggcgtggccctgtccgtcggacagtacctggacttccacgtgacgtgggttggtcaggtacttttccaggtagaccatcgggttgttgaaccaggcgcctgcttcggagcgggtctgcttggcggcttcgatcaggtcttcttccttgtgcaccacgcgcatgccgcgaccaccaccgccaccggcggccttgatgatcaccgggtagccgacttcgcgaccaatgcgcagagcggtttcctcgtcttcaggcagcgggccgtcggaacctggaacggttggcacgccggcagcgatcatggcttccttggcagagaccttgtcgcccatcaggcgaatggtctcggctttcgggccaatgaaggtaaaaccggatttttccacctggtcgacaaagtcggcgttttccgcgaggaaaccgtagcctgggtggatggcggttgcgcctgtcacttctgctgcagcgatgatgcttgagactttcaggtacgagcttgtagccactggcgggccgatgcagatgctttcgtccgccagtttcacgtgcatcaattcagtatcggccgtcgagtaaacagcgacggtcttgatgccttgttccttacaggcgcgcaggattcgcagggcgatctcaccgcggttggcgatcaggactttttccagtttcttcgcaggtttcaacatcgaaggcactccgcggttcaaacgatggtgaacagcggctggtcgtactcaaccggctgaccgttttctaccaggatggattcgatgacgccggctttttcagcggtgatgtggttcatcatcttcatcgcttcaacgatgcagatggtgtcgcccactttcacggtagcgccgacttcaacgaaggctggcgaagtcggtgccggggtgcggtagaacgtaccgaccattggcgacttgaccacgaagccgttcagcgccggagcggctggggcggcaggtgcagcggcagcagcaggcgcggcggccggagcagcagcggccggagccggcgcttgcatctgtggcgcgtagaactgttgggccggggtcttgctgtggcggctgatccgtacggactcttcgccttccttgatttccagctcgtcgataccggattcttccagcagttcgatcagtttcttaactttacggatatccatgaatcatcaactcccaagggtcggtcaggggcgcttggccggttgttcaagttgttccagggcggcctccagggccagtcggtacccgctggcgccaaggccgcagatcacacctaccgctacatcggagaagtaggagtgatggcggaaagcttcgcgtttgtgcacgttcgacaaatgcacttcgatgaatgggatgctcaccgccagcagcgcgtcacgtaatgcaacacttgtatgcgtaaaagcggcgggattgatcaggataaagtccacgccttcgccgcgcgcggcatggatgcgatcaatcaattcgtactcggcattgctttgcaggtagagcagatggtggccggcttcacgcgccctgcgttcgagatcaaggttgatctgctccagggtgactgccccgtagacgcccggttcacgggtgccgagcaggttcaggttgggtccgtgaagaaccagtaaggtcgccatcggctgttccttgttattgatgtgggtacggcagaacccggcgactatgccgcaaagcctttgtgactgtccagttctatgcagtaggcggcacgattagcgaggatagcgcgaaaattgtgactgtggggctggattcggtcattggcaacaccgtctcgaatcctgtggagatcgtgtcagacgcggaaggcttgaacggcagtgttgagctgcccacccagcaccaacaactgctcaccctgtcgtcggccctgtccgattcgcagcaaattatcctcacccaactgatgaatccgctcactgttgtcgcgaatctcactgacggcaccactctgctgcgcggtcacatcggcgatgcgcacggcggtctcggagatggtctggatcgcgccgacgatttcatccagcgcaccgtccgctgcctgggcttgctgggcggtggcttcggcgtgttcgacctgggcgcgcatgccttgcaccgattggtgggcggcgctttgcagcccggcgatcaaggtctggatttcggcggtggcgccagcggtgcgttgggccagcgagcgcacctcgtcggccaccacggcaaaaccgcgtccggcttcaccggcacgggcggcctcgatggcggcgttgagggccagcaggttggtctggtcggcaatcgagcggatcaccgtgagtaccccgccgatggtggcagattcctcagcgagtttttcgatcatctgcgcgttttgctgcacttcgcccaccagggcatgcagcccggtcaggctcaggccgatcacgcgctggccttgctccaccgcctggccggcgctgcgactggcaccggcagcctggctggcgtcgccggcgacttgctggatcgtcgcttccagttcgcccagcgaatcacggatctgcgcggtatccccggcctggcgttcggcgccgtcgtgcaggccgctgctcagttcggcgagggtgcggctgctgccggcgacttcctcggcgttgccgcgaatggtgccgaccaaatccaccaggtaggcgcgcaggcggttcagagacgcttcgatatcgtgcagttcgcggttggtcttgcccagggcaatcggccggctgaagtcaccttcggcccaagtcgacagggctggcgccaggttggtcagcactcgcgccagcttgcgttgcagggtgtcgatcaatagcgcgatcaacaggatcaggccaatcatcagcccttgcatcaggcgcacttcgccctggatcttggcgtgttgcgcacgcacgaccggctccaggccggcgatggcttgttgcacggtgttgattttctggtgggttttggcggccaggtcggtgcgttgctggatctggtcgcgggtgcgcttgagttcggcggggtagcgggtcagcaggctgttgagttcacgcttgaggtcgacgccggtgtcttgggcttcagttttttcgctgttctccaggcccatcagcgcagaaaaatcatcggcgctggactcggcgctggccttcacgccgagcaacggcagttgctccagcaggtcggcctggctgcgaatgttgccgacttcgcgttccacatcgtcggccagttccgcacgcccgctgctcaccagtttgtcgcgggccagcgacaacttgcccagatgctgggaggcggccagcaacggcggcagatagcgggcggcttcgggagaactcacgccgatggcgtactggctcagttgctccaggttggcgcccaattcacgttcggcttgcagcagcaaggcttgcgggtcgcctgccagcttgccggccgccagcaagtcggtcttgctgaacgcatccaggtccaccaggcttgggcgcaggttctgcgccaggtccgccggcagttcatccagatgctgtaccaggctttccaggctctggcccgcgctgctcaagcgcagggcgtcgccgctggccaggtagtcgtcgatattgcgcgcggcttcgttctggaaactctgcgacaggcccaggtagcgctccatcagcaaatagggccgctccagcgcccgttgcgaccaccacaacgtcgcccccagcgccaggcacacggccaccagaagaagggtattgagattggtcagcagcttcaggcgcatgcgtggtttcaaccgacagcaaaagataagtgcctgaagttattgcgtttccgttacaaagttatgacggaatcagtggattccggtgaaaagatggcactttgctttgatgtgcgtgcggcttgcacacgattgcgcccagcgtccttggcacggtacagcgcctcgtcggcctgggcggccatcatcaggctatcggagccgtcgcacagctccaccagtcctgcgctgaaggtgcaccacaaatcctggggttgcgccgggtagtggatctcggcaaagcgcccacggatttcatccagcactctgcaggccgattccagatcggtgtcgggcatcacgatggcgaattcctcaccaccatagcgcccgatgtagtcggtcttgcgcaggcgctgcttgagaaacagcgccagactcttgatcacgcggtcgcccatggggtggccgtggctgtcattgacccgcttgaagtggtcgatgtcgagcatggcaaagctcaatggcttgttctcgcggcgcgcgcggaagctgcagtcttcgagcaattgcaggatgtgggtgtggttgtacaggccggtcaggctgtcgcgtaccatccgcgccttgaggttgcgcgcccgcgccgcgcggttgcgcacggtggtgatcaggtggcgcggcttgatcggcttggtgaggaagtcgtcaccgccttcgctcatggcgtccagttgcttatccaggtcgtcttcggccgacaggtagatgatcggcacgctgacgtaacggtcgttatggcggatgaccttggccagttcggtgccggtacaggcgggcatgtacatgtcgaggatgatcaggtcgggctggaagtccgccagctcggccatggcctggatcggctcgatcaaggtgcgagtgacgatgccggcactgttgagcaggcgctcggtgtgcagtgcctgggcccgcgaatcgtcgatgatcagcactttatacggttcgtactgggcaacgcaggtcagtacttcgatcttttccagcaggctggaagcttccagcgtaccggtgaggaattcctggcccccggcgcgcacggcggccaggcgggtcggggtgtcggtttcgtgcaggctgaagaacagcagcggcagcttctgttccaggccttcctgggcttcggcggcgagcttgaggcccaggccggcaccgcagaaatccacgtccatcacaatcgccgaaggcaggcgctcggccatcgacgcacgaaacgccgccacgctgtccagggattgggcgctcatgccaaagaactccaactgcttggccaggcgctcggcacggtcgtgatcggccagcatcacgtagatcggcttgcgcatcggcggcaggaaggtttgctcaagctggtcgccctggcgcaggccggtacgggacaggcgctgcatcaggcggttgagttcggtgatcagttggctgctcaggcgcccgcggttttcgttcacggccttgagagactcgccgatgtggtgcgcgagctggctgtgttccggctgttcgaaacgctcggcaaagcgcagcaggcgcagattggcctcgctgagttcggaaaggtcggtgccggaccactcgctgcgttgcaggcgctgccagatctcaagaatttgacgtgcctgatgaattacccgctgggcaaaatgctgcttgaggcgctcacggctggggtcttctggctcggtcatatcctgactactagtgagggtgcatgctgaggtcgactgatggctctatgctagcacctctttcccatgggatgagtgtcatacgtcaataaactgtgcgtgcggagtattcagttgctgacccgctggtcgctcggcgtaaaaagcgtgcatcctttatagtccaacaccctctgtgcgccagtttggcgaaaagccccgcacgggcgggcacgatggggtagggttgtggtcggagtgtttgaacgcacgccatcaattcaagtgcatgaactcaagtgattgaaaggatatcgccatgctggactggaaaaaccgtgcaggcagtgccaaaggccccgcccctgagcccaagtcggccaaccgcagctattttcgtaccttgctgatgagccgcgccgtgctcagcgtgctcggcctgtacctgttggtcacgggcgccctgggctggtactggagcgaagagccggcgctgttcccggtccagcagaatgcacagcttgccgccgaaaaagacggcaagcagatggtggtgggctttaccaccgtcgaaaccctcaagactgtggtcggtaccttgctgaacaagccgggtggctacatttccaacgaccgcttcccgcctggcctgtggatggacaacatgccgagctgggaatacggcgtgctggtgcaggtacgtgacctgacccgcgccctgcgcaaagactttgcccgctcccaatcgcaatcggccgaggatgcggatctggccaaggccgagccgcgcttcaacttcgacaacaagagctgggtgctgccgtccagcgaatcggaataccaggaaggcatcaattccctgagccgctatgaggcgcgcctgtccgacccgaaccagaagggcgcgctgttctatgcgcgggccgacaacctgaacaactggctgggcgacgtcgccacccgcctgggctcgctgtctcagcgcctgtcggccagtgtgggtcgcgtgaaactgaacaccgcgctgaaaaccgaagcgctggcgccgggtgaagtgccgcaggtcgatgaagaagtggtggaaaccccatggatgcagatcgacaacgtgttctacgaagcccgtggccaggcctgggccctgtcccacctgttgcgcgccatcgaagtggactttgccgacgtcctggccaagaagaacgccaccgtcagcgtgcgccagatcattcgtgagctggaagcctcgcaggaaccggtgtggagtcctatgattcttaacggcagtggcttcggtgtactggcgaaccattcgctggtgatggccaactatatttcccgggcaaacgctgcagtgatcgacttgcgtcagctcctcaaccagggttgatgatggacgctactcaaaaggaggccgcccaccgcgcggcttccgatgccgaactgatctgctgggtcgatgagcaggacactctgctcggcagtcttgtcagggccgatctgcgccagcgcgggttgatcggccgttgcacctttatcttcctgttcaattcggccggtgagctgtgtgtgcaccggcgcaccctgagcaaagccatgtaccccggtttctgggacacggcggcgggcgggatggtggctgcgggcgaatcctacgccgtgtcggcggctcgcgagctggaagaagaactgggcgtcggcggggtggaactggtcgaacatgaccatttctatttcgaagatggcgatagccggctctggtgcaaatcctactccgccatctgggacgggccactgcgcctgcagccggaggaggtgatggaagcgcgctttttacctatcgacaccgtcctgcaggaggctgagcaaaagccctactgcccagacgcccaggaaggcttgcgccgctatctggccttacgtcgctaaagttgcataaattggcgccatttggctcttagcaagtcggctttttgtggttacactgcgcgacttttcacccgaaccgccttggcggttcggtagcgctgcccctgcctgagtggggcttcgcggtcggtcatcctgatcgatcagtcttcatcctcccaagaggattgccggtggccaaaaaagccgcatccttcgccgcccttggtggcctggtattttccaccgacgcaggtcgacactgcccggactgtcgtcagcccgtggattcgtgtacctgcaaacagaccctgatccccgaaggcgacggtattgcccgcgtgcgccgcgagagcaaaggccgtggcggcaagacggtgaccaccatcaccggtgtgccgctggccgaagatgcgctgaaggaactcgccaccacgctgaaaaagcgttgtggcaccggtggcgcgttgaaagacggtgtcatcgagatccagggcgatcacgtcgagttgctgttggccgagctgatcaagctcgggtacaaggccaagaagtccggcggctgaaagcctcttcccgacctgtgtctaaactctgtcctgcgcgtggggtcctaccttgcacgcaggcaaatcgtcattttcattctttagactgcgccagcctcaaccaggggcggcgctttcgccttcatttataggggacttcgatgtccgtacgacgcacacgcaaagacgatggcagccaatggacagttgcggacagccgcagtgtttacgggattcgccattggggggccgggtatttcgcgatcaatgaagccggtcgcgtagaagtccgtccgaacggcccgaacagcacgcctgtcgacctgtacgagcaagtcgacgaactgcgcaagagcggcctgtcgttgccgctgctggtgcgcttccccgacatcctgcaagaccgtgtacgccaactgaccggtgctttcgattcgaacatcgagcgcctggaataccagagcaagtacaccgcgctgtacccgatcaaggtgaaccagcaggaagcggtgatcgaaaacatcattgccacccagaacgtgtccatcggcctggaagccggctccaagcccgagctgctggcggtattggccctggcgccgaagggcggcaccatcgtctgcaacggttacaaggaccgtgagttcatccgcctcgcgctgatgggccagaagctcggccacaacgtgttcatcgtgatcgagaaagaatccgaagttgagctggtgatcgaagaggccgccagcctcaaggtcaagccacaggttggcctgcgtgtgcgtttgtcgtcgctggcgtcgagcaagtgggcggacaccggtggcgagaaatccaaattcggtctgtcggcggcgcaactgctgtcggtggttgagcgcttccgtgcggccggcctggaccagggcatccgcctgctgcacttccacatgggctcgcagatcgccaacctggccgactaccagcacggtttcaaggaagccattcgttactacggcgaactgcgcaacctcggcctgccggtggaccacatcgacgtcggtggcggcctgggcgtggactacgacgggacgcactcgcgtaacgccagctccatcaactacgacatggatgactacgccggcgtggtcgtgggcatgctcaaggagttctgcgacgcgcagagcctgccgcacccgaacatcttttccgaaagcggccgttccctgaccgcccaccacgccatgctggtggtgcaggtcaccgacgtcgagaaacacaacgacgaaatcccgaccatcgaaaacaaggaagccctgccggaaaccgtgcagtggctggtggacctgctcggcccgaccgacatcgagatggtcaccgaaacctactggcgcgccacccactacatgagtgacgtggccacccagtatgccgacggcaaactgaccctggccgaaaaagccctggccgagcagtgctacttcgccgtatgccgccgcctgcacaactcgctcaaggcccgccagcgctcgcaccgccaggtgctggacgaactcaacgacaagctggccgacaagtacatctgcaacttctcggtgttccagagcctgccggacacctgggccatcggccaggtattgccgatcctgccgctgcaccgcctcgacgaagagccgctgcgccgcgccgtactgcaagacttgacctgcgactccgacggcaagatcaagcagtacgtcgacgagcagagcatcgagaccagcctgccggtgcacggcttgaacgaaggtgaagactacttgctggggatcttcctggtgggcgcctatcaagagattctcggtgatatgcacaacctgttcggtgataccgattcggtgaacatctaccagcgtgaagacggttcggtgtacagcgccggtatcgagacccacgacaccatcgaagacatgctgcgctacgtgcacttgtcgccggaggagttgatgacgcactaccgtgacaagtgtgcgagcgcgaagatcagcgccagtgagcgtacgcagttcctggatgcgttgcgcctgggcttgacccggtcttcctacctgtcctcgtaaaaaatgtgggagggggcttgcccccgatagcggtacatcagcaacacttaagttgcctgatccaccgccatcgggggcaagccccctcccacatttgacgcagtgctgatcctgaaattgtctgagggctgagcaatgttgagcaaatggccgcaagtgttcaccctggcagtggccgcattcttggccgcctgctcccccatcaaagtcctcaacgccctcaccccttccagcaccttcaccaagaccgcggccatcgcctacggcgctgatccgcgccagaaactcgatatctaccgtcccgctcccgccatcgccaacgcgcccgtcgttgtgtttttctacggtggcagctggaacagcggctccagggacgactacggtttcgtcggcgaagccctggcgtcacgcggtattgtcgtggtgattgccgactaccggctttatccccaagtgcgttaccccgcgtttctccaggatggcgctcaagcggtggcctggacccaccagcacatcgccgaatacggcgctgacccgcagcggctctatgtgatgggccacagctccggcgcctataacgcgtcgatgttggcgctggatgcgcgctggttgaatgcggtgggcttatcgcctgccattttcaaaggctggatcggactggccgggccgtatgattttctgcccattgaaaataaggacgtacggccggtgttcttcttccctgactcgccgcctgagtctcagccgatcaaccacgtcagtgccgatgcgccgccgagcctggtaatggcgtcaacggacgacaatctggtcaaccccacgcgcaatactggcggcttggctaataagttgcgcgcggccggcgtgccggtagaagcgttttacttctccaggaccaaccaccagacgctggtggcctccctgtccaggccgttgcgttggttggcgccggtgctggataaggtcacggcgtttatccaagccactgatcctgccggttcaagcgccaggcaatcgcccacaaagtaaggctgcgcagggccatgaacagcaggaagcttatccacaacccgtggttgccgaacccctgcaacgcccaggcaaatggcagcaggatcaccacggtcagcaacatgccattgcgcatttcccgtgcacgggtggcgccgatgaacagcccgtccagcaggtagctccacaccgcaatcaagggcaacacggccaggtagggcaggtagatatcggcggtctcgcgcacgctggggatatcggtctgcatggcaataaacaaatggccggcgaaggtgaacaacagggcaaagccgacgctggcaatcaacgaccaaccgcaagcgaccactaatgaacggcgcaaggcctggcggtcatgggcgccgatggcgtggccgcacaaggcttccaccgcatgggccaagccgtccagcgcatgggccgtcagcaacaggccgttgagcagcagtgcattagccgccacggtggcgtcgcccaggcgtgcgccttgcaccgtgatcatgaaaaacaccgattgcagcgcaaggctgcggatgaagatgtcgcggttcaccgccagcaacgggcgccagctctcccatagtttcagtgctgcccaggcgatatggccggggtaggcgcgcagggctttttgcgtcatcgccaggcccagcaaggcgccggtccattcggcgataacggacgcccgcgctgagccgaccaccccccaatccagacccagcacaaaccacaggttcagggcgatgttgaccagattggtggtcagcaggatcgccaacggcgcacgggcgttctgcgtgccgaggaaccagcccaccagtgcatagctggcaagggcggcaggcaggccgaacaggcgcgtgtggaagaagtcccgggtcagttgattgagttcgggtgagggttgcatccattccaatgccagatgactcagcggaatacccacggtgcccagcagcatggctaaccccagcgccagcagcaggccttgcaggaggatttgtcgcaacgcggccccatcattgcgcccggcagcttgtgctgcaaaaccggtggagcccatgcgcaggaaacccatggcccaggccaggaaggtatacaggctggccccgaccgccacggcgcccagttgatgggcgtggggcaggtggccgatgaccatgctgtcgaccagggccacaaggggcaccgagatattcgacaggatcatcggcgcggccagggcccagacgcggcggtgggtggggcggtggcgccagtcgatgagtagggtgggcatgggggctccttgggggagcggcattgtaacgggccctttatctcactgcagaaccaatgtgggagggggcaagctccctcccacctttggatctccagtgtttgtgggatttggctcgacattgcgtcccatcaagaaccaaagcaccctccgtcggtcaatgtgaccagcaccacatcggccccgtgcgggctgatatatagttcacccttcggacccctctcacaacgagtgccccatgtttaacaaaggattgttcctggcctgtgcgctggccctgctgagcgcctgcgattcctccgataaaccggcagccccgactgctccagccgcggcgacgattgcaccccagccggccaaggcggcggtcgacgtggcggcgctgaagcagcgctatgccgggcgtgagttgagtgtggtggacgtgtccgaagtgcagctcgatggggccagcaccctgtccgtgagcttttccattccgctggaccccgatcagaagttcgccgacaaactccacctggtggacagcaaatccggcaaggtcgatggcgcctgggaaatctccgacaacctgatggaactgcgcctgcgtcacctggagccgcagcgcaaattggtgctcaccgtcgatgccgggctgaaggcggtcaacggcaacacgctcgccaccgagtacggcgcccgcctggaaacccgcgacctgcaagccaccgtcggcttcgccagccgtggcaccttgctgccgacgcgcctggccgaagggttgccggtgatcgcgctgaacgtcgacaagatcgacgtcgaattcttccgcatcaagcccgaatccttgccgaccttcctcgcgcagtgggggcgcaacaccagcctgcagagttatgaatcccgcgaactgctgccgctggccgacctggtctacggcggtcgcttcgacctgaacccggcgcgcaacacccgcgaaaccctgttgctgccgatcgccggcctcaagcagttgcagcagccgggtgtgtacctggcggtaatgcgcgcctccggcacttataactattcccagccggccacgctattcaccttgagtgatatcggcctgtcggtgcaccgctacgccaatcgcctggatgtgtttacgcaggcgttggaaggcggcaaggcactggacggcgtcgaccttgaagtgctcgacgccgagggccgtgtggtcggccagggcaagaccgaaaagggcggccacgccgagttgccgttgccgaaaaaggcccaggtgttgctggccaagcagggcgagcagaccagcatgctgcgtctggacagcgccgcattggacctggccgagttcgacatcggcggtcagccttcccaccccttgcagttctttgtcttcggtccgcgtgacctgtatcgccccggcgaaaccgtgctgctcaacgccctgctgcgcgacaaggatggcaatgccgtcaaaccgcagccggtgagtgttgaagtgcgccgcccggatgaacaggtgagtcgcaaattcgtgtgggatgccgacgcctccggcctctatcaatatcaactgcaattggccggcgaagccccaaccgggcgctggcagctggtgttcgacctgggcgatggcaagccgcaactgtatgaattcctcgtcgaagacttcctgcccgagcgcctggcgctggaactcaagggcagcgataccccattgaacccggcggataacccggtgattcaagtgaccggacgctacctctatggtgcgccggcatcgggcaaccgggtcagtggacagatttatgtgcggccgttgcgcgaagcggtcaagtcgctgccgggctatcagttcggctccgtcactgaagaagagctgagccaggatttcgaactggacgaaagcgtgctcgacgccaagggccaggaagcgttgaccctggaaagcaaatgggccgaggctaagtcgccgctgcaactgatcgtgcaggccagcctgcacgagtcgggcgggcgaccgatcacccggcgcctggtgcagcctatctggccggccgagcaactgccgggcctgcgcggcttgtttgacggcaaggaaaccaacggcgatggcccggcggaattcgaagtgctgctggccaaccaggacgggcagaaactcgccgcgccaaacctcaaggtgcgcctggtgcgcgagcgccgcgactactactggaactactccgagagcgatggctggagctaccacttcaacgagaaattcctcaacctcgacgaacagaccctgaacatcaaggccggcgacacggccaaggtcagcttccagctggagtggggcccgtaccgcgtcgaggtggaagacccgcagaccggcctggtcagcagcctgcgcttctgggccggctaccaggcccaggacaacactgaaggcggcgccgtgcgccccgatcaggtcaagctggcgctggacaaaccggcgtatggcgacggcgataccgccaatgtcaccgtcaccccgcccgctgccggtaaaggctacctgctggtggagtccgccgaagggccgctgtggtggcaggaaatcgatgtaccggccgagggcaaaagctttgcggtgaaactcgacccgaaatggtcgcggcatgatttgtacgtcagtgccctggtgattcgcccgggcgagcgcaaagccaacatcacgcccaaacgtgccgtgggcctgctgcacctgccgttggatcgcacccagcgcaaactcggcgtgaccctcaccgcgccggaaaaaatgcgccccaaacagccgctgacggtgaaagtcgccgccaaaaacgccgatggcagtgtgccgaaacaggtgcatgtgctggtggctgcggtggacgtgggcatcttgaacattaccgaatacccgacgccggacccgtactccagcctgttcggccgcaaggcttacggcgtggaccagttcgatatctacggccagttgatcgaagccgggcaggggcgcttggccagcctggcattcggcggtgatgcggcgctggccaagggcggcaagcgcccggacaccagcgtgaccatcgttgccctgcaaagcgcgccggtgaccctgaacgagcagggcgagggcgaagtcagcgtcaatatccctgacttcaacggcgaactgcgcctgatggcccaggcctggaccgatgaccgctacggcatggccgaagccaagacggtgatcgccgcgccgttgattgccgagctgtcggcgccgcgcttcctggccggtggtgaccagaccacgttggcaatggacctgtccaacctgtcgggccaggcgcagaagctggatgtgcaactgagcgccgaagggcagttggagttggtcaacgctggcgcgcaaaccgtcgagttgaaacaaggccagcgcaccaccctgcgcatcccggtgaaagcctggggcggtctggggcagggcaaggtcaaggtcaccgtgaacgggctggacctgccgggtgaaaacctgccgccgttcacccgtgaatggacgttgggcgtacgcccggcgtacccggcactgctcaagcattaccgcgcggtgctcaaggatcagccgtggagcctgccggcggacacgctcgatcagttcgactcatcagggcgccaggcgctgttgagcctgtcgagccggccgccgcttaacctcggtgcgcagatcagtgcactcaaggcctacccttatggttgcctggagcagaccgcgagcggcctgtacccgtcgctgtatgccgacgatgcgctgctcaagcgcctgtcgatcaagggcgagtcggacagcgaacgtaaacgcaagatcgagctgggcatcgaacgcttgctaggcatgcagcgctacaacggcagcttcggtctgtggggcgccgatggcgaagaagaatactggctgacggcctacgtcaccgacttcctgttgcgtgcccgcgaccaaggctttgccgtaccgccgcaagccttgaagaaggccagcgagcgcctgctgcgttatgtgcaggaacgcaacctgatcgacgtcgactacagcgacaacgccgaccacacgcgcttcgccgtacaggcctacgccggcatggtgctggcgcgcagtcaacaggcgccattgggggcgctgcgcagtattttcgaacgacgcagcgatgcacgctccggcttgccgctggtgcagctggctatcgcactgcagaacatgggcgaccagccgcgtgccgaccaggccttgctcgcggggttggcgacgcagcgtaacgccaatgagtggctggccgactacggcagcccattgcgggaccaggcaatgatcctggccctgctggaagagaacgacctggccaagggcaagcgtgaggagcgcttgtttatcctctcggatcagttggcggccagcccgtacctgtcgacccaggagcgcaactcgctgttcctggccgggcgcctcgggtttgccaagccagaggcgaactggcaggtgtcgctgaccggcagtggcggcgtgcaggcattgagcaaccaacactcgacgctggaattggagggcaagctgctgtccagcgatctgaccttgagcaatcagggggacgcaccggtgtaccagcagctgacgatctcgggttatccacaggtgccaccggcagccggtggcgacaacctgagcatccgccgcgaatacctgggcatgaacggccagccgctgaacctgcgcaacctcaacagcggggagctggtactggtgcatctggcggtcagcgccaagcagcgtgtgccggatgccctggtggtggatttgctgccggccggcctggagctggaaaaccagaacctggcgcaaagcgccgccagcctggaaaacgccagcagccaggtgaaggaatggcgtgagtcgatgcagaacgcctcgctcaagcaccaggagttccgtgacgaccgctacgtggcggcgatcaacctggacggctccggcaccacacacctgctgtacttggcgcgggcggtgacgcccgggacttatcgtgtgccgccgccgcaggtggagtcgatgtaccggccaaattggcaggcggtgggggagacgccggcggatctggtgatcaagggacgttaatgtaaaacggggcctcaatgtgggagggggcttgcccccgatggcggtggatcagtcagcttatctgtagctgacccaccgctatcgggggcaagccccctcccacaggtgattttcggtgttttgggatcagtggacgacccagctcagaagccacaggcccagcagcagccagatgatgcccatgatgatcgacgcccgcatgaaggcgcgcaccgccgagtacagcagcatcaggccgacaatcagagtgaggatgctgatgatcgaggtgtccatgcccaaggtgcgggacaggccttcgacaaagttgccaccggcgtgggtcagcgcaccgaacaggccgctgagtccgtcgacgataaagcggatgatcgaaccgagcgcctggcccaaccattcgaaaaagctttctacctgcatgtgtgtgtcctgatgagaaggtgggcgtatctgtgcctttggttgttattgcaacaggctagttccctaccagcatagaggtttgcccgtttgagtttgcgtttagttgcccgctggaccctggccagccttttgttggtgatcgccctgctgtggctggccgatcgcatctggccgttgcccctgcccaaagatgacctggcgcgggtggtgctggccgaggatggcacgccgttgtggcggtttgccgatgccaacggtgtgtggcgctaccccgtgcagaccagcgaagtatctccgtattacctggatgcgctgctcacctatgaggaccgctggttctaccagcaccccggcgtgaatccgctggcactggtgcgggcgacgtggcagaacctgaccggtgcgcgggtggtgtcgggcggcagcaccttgtcgatgcaggtggcgcgcttgctggatccgcattcgcgcaccttccatggcaaattgcgccagttgtggcgcacggcacagctggaatggcacctgtccaaggaagaaatcctcaacctctacctgaatcgcgccccgtttggcggtacgttgcagggcgtggctgccgccagttgggcgtacctgggcaagtcgccgtcacagctgacccacgccgaagccgccttgctcgccgtgctgccccaggcgcccagccgcttgcgtccggaccgccacccccaacgcgcccaggacgcccgtgacaaagtgctgcgccgcctcgccgaattccatgtgtggccgcaagctgccgtcgatgaggccctggaagaaccgctcttgcttgccccgcgcctggaaccgagcctggcgcccttgctcgcacggcgcctgaaccgcccggacagcccgccgctgatccgcaccaccctggacgccaccctgcaacgtcgccttgaagacctgctgttgggctggcgcgcgcgtttgccggagcacacctcggccgcgatcctggtggtggaagaggaaaccatggccgtgcgggcctacctcggctcggtggatatcaacgacgtcaagcgcttcggccatgtggacatgatcagcgccctgcgttcgccgggctccaccttgaagcccttcctttatgggatggcgctggacgatgggctgatccactccgaatccctgctgcaggatgtgccccggcggtatggcgattaccggccgggcaacttctccatgggctttaccggtgcagtgccggcgagtacggcgctgtccagctcgctcaacctcccggcggtgcagttgctggaagcctacgggccgaagcgcttcgccgccgaaatgcgcatcggcggcgtgcctttggcattgccggcgttggccgagccgaacctggcgctgatcctgggcggtgcgggcagccgtcttgaagacctggtgagcggctacagtgccttcgctcgagacggcaaaagcgccacccttcgattgcaaccggacgacaccctcagagagcggccgttgctgtcgccaggctccgcctggattgtgcggcgcatcctcagcggccaggcgcgacccgaccgcgacccgcgtgccgagttggtgcagcgcccggtgctggcctggaagaccggcaccagctatggctttcgcgatgcctgggcgatcggtgtggggccgcgttacttgatcggcgtgtggatcggacgcccggacggcacgccggtgccgggccagttcggcctggcctccgccgcaccgttgatgttgcaggtgcacgatgtgctgaccaaccgcgacagccagcgcggtatcactgcaccggtcaagctggtgccggcaaatgtcggtgtggccgcgatctgttggccgctgggccagccgatgagccgcagcgatcccaactgccgccgccagcgctttgcctggacgctggacaacaccacgccacccactttgcaggcgttggaccagccgttgagcgtgggcttgatggaaagtgtgtgggtcaatgccaagggcttgcgggtggacgctcattgccctggcgccgagcccaggagtatcgccctgtggcccgcgcccctggagccttggctgcccagggccgaacgccgcgaagcgcgcattcccgcggccgaccctgattgcccgccaccggcgctggccgcgtcctcacctttatccatcgttggcgtacgtgaaggcgaccaactgcgcctgcccgctgccagccaacaggcgctgcgcctgaaaatctccgccctgggcggcagtggccggcgttggtggttccttaacggcgcgcccctgggcgacagcgccaaccaggactttatcaacgccagtttcgaacaacttgggcgttatcaactcagtgtcctcgacgaagccgggcagacggcgcgcatcgagttcagcgtcgttgattagatcgctatcgggggcaagccccctcccacactgggatgtgttggtctatcaaaggtgggagggggcttgcccccgaaggcggtctgaaggttcacttgccttcaaggccattccccccgaagctatccaccttcaggagcctgccgcatgaacctcgaacacctcaccgaacgcctgcaccgcatccgcgataccaaccactggaagccgttccacagcccgaaaaacctggccatggccgccagcgtggaaatggccgaactggtggaaatcttccaatggctgaccgaagaccagtcgcgccagctgccggccgacaaactcgcccatgccgggcaggaagtcggtgacatcgtgctgtacctgctcttgctgtgcagtgagctgggcctggacatgaacgaagtggtgcgcgccaaactggccgacagcgaacggcggtttgcccatgagtgaccgtcatttcgaccagttggccacgcgcttcgccgagaaaatctacggcggtgccaaaggcgcgatccgcctggcagtgctccaggccgacctcaccgaagccctgccaaagcgcccgctgcgtgtgctggatattggcgcgggcctgggccatatgtcgctgtggctggctgaacaaggccaccaggtgaccctggccgaaccggccgaaccgatgctcgaaggcgcccgccaacgtttcgccgaggcggggcagaccgcaacgtttatccatgcaccctggcaagacctgctcggccagctcaccgaaccctacgacctggtgctgtgccacgcggtgctggaatggctcgccgaaccccatgcgatcctgccggtgctgcaccaactcacggcgccgggtgggtggttgtccctggcgttctacaaccgcgatgcgctgatttatcgcaacctgctcaaaggccacttccgcaaaatgcgcaagaatgacatggccggcgaaaagcagagcctcacgccgcaacaaccgttggacccacgagaattggcggcgcaactcgaaggcctttggcaggtcgaaagccaaagtggcgtgcgggtgttccacgactatatgccggtggaattccaggcccgtgcggatttgcaggatcttttggagatggaactcgctcaccgtcgtcacccaagctttgccggacttgggcgttatttgcactggatctgccgtccggtttaagcggcccagtctgcggaggtcgaaatgcgtcgtctctgtttgatcctgttgtccctggggttgggcgcctgttcaagccccaatccttatgttgccgcgtcggcgccgatcccaccggcgccgccccaggcggcccacacctttgatgccagtgcctacccggcgccggtgcgcgattacggcgcctaccgcaattgggcctggcgcaacggccagcttccagcgggcacggcctgggccgattcggcgcagattgccgaagcggtcagcggcgccctcgaccagcgcggcctgcgccccttgcatgacaatcgcccggcggacctcttcgtcagcgccgacgtgtgcctggagaagcgtctcaagcaagtccaggatgactacggctacggttacggcggctacaaccgctatggcaatggctatggcatgtacaactcggtgccgatcgtgcgcacctatgaagtgcaggtcgtggtggtgcgcgtcaacctgttcgatgcccgcaccggccagccggtgtggagtgccagcgcagagacgggcagccagggcagcctcagtgagcggggagatgccttgcgccaggcggtgcagaaggcaatgacggcgtaccctcccagttaaccgctattctcatctttagcgcgggtcgctctttggagaacaaccatgtttcgtcgtatcgctacgctcgcttttgttgtgctgcttggcggttgccagaatgcccaggtcaaccacgattttgacgccagccgggatttcggcgcctaccgcagttgggcctggaaagacccggccctgcaatatcgccccgatgacccgcgcatcaagagcgacctcaccgaacagcgcatccgccaggccgtgggtgaacaactcgaccagcgcggcctgcgccctgcggcgcctggcaccagggctgacctgaacgtgcaggcctacctgatcgtcgaagaccgccagcaacaggtcaccaccaactacggcggcgcctggggcggcccgtggaatggctattggggcgcgccgatgtacaacgaaacgcgcaacatcacctacaaagtggcgaccatccagatcgacctgctcgatggcaaggacggcaaactggtctggcgcggcagcgacgaacagatgatggccacctcgcccaacccacaggaccgtgacaaagccatccgcaccaccgtcacccgcgtcctctccagctacccccctcactaacccctttaggcgcaggctcgccgtggtgagcaggcttgctttggccagcaggcttgctgtggcgagcaggcttgctgtggtgagcaggcttgccctgcgttgggctgcgaagcagccccctaaaaccgatttatggcaacgggccagcccttgtctacactcaaaaccatctacggagagtaagcgctaaggagtgcctgatgtctccccgacttggtgacaggcagcgtggtgcaattggcctgatggcggcggctaccctggcgatggccatggtgttcctgctgctggcggtagacagcggccgtctctacctggaaaagcgcaagctgcagtccgttgccgacagtgccgcgctggaagccgcaagccgtggcggcctgtgcacacccaccaccaccgccaatgactacgccgtgcagaacgccacacgcaacggcttcaccgtggtcgccggcgacaacagccgtggcctggccgtgacctgcggcacactgaccaccaatgccagcaatgtccgcgtgtttgcggccgatgccaccaaaaacgatgccgtccgcgtggtcgccacccgcagcgtgatgaccagcgtcgccagtgggctgtggaacatgttcagcggcgcgccgatgtctacccaaatggtgctgagtgccactgccgtggccgcctatgcaccgccggtggcgcaactgacgattcgcagcagtctggcctcggtgaactccggcaactccccgctattgaacatggtcatcggcaacctgttgggcggcagcctgtccctgaccgcagcgggctggaacggcttgctgacgacgaacgtcaatctgctcagttacctggaccagttggcgattcaattgaacgtcaaggcgggagactacgacgcgttgctgagcactgcggtatccgccagccagttgatcgacgcggcggtgaaggtcctgcaaaaaaacggcgcggtcgccacggcggtgatcaacgacgtgattacagtgaaagccatcgccccgaatacccagctgttgaaggtgggcgatctgttgaaggtcgctaccggtacaccagcggctgccttgaataccagtgtgcagttgtttcagttgctggagaccgtggcgcagctatccagtagcaaaagtgcggtcagtgcggcagcgcaggtgaatattcctctggttggcaccgtctcggtccagaccaaagtcatcgaaccgccgcaactgtctgcgtttggcaatccggccaaggccaaggctgggctgttgaataatccgccgacggaccagatttttgtacgaactgcccaggtacgcacgttggtcaccatcgatgcacccatcatcaaggtggtctctggggtttcctcgatactgaccgggctggcgacgcccgtgtcgaaggtggtcggcggtttgttgaacctgaacctgctcgatgtggtggccggtgtcgtgtgcatagtcgggtgcaatgtggctgatgtggatatcaccacgaccctgtccatctatatcgaggcggccagtgcagagagccacgtgacagacttcagttgcgccaccccggccaccaagtcgttgacggtgcaggccaccacctcactcgctaccttgggcgtcggctacgttgacccggtgtcggcgttttcatcgtccttgcctgtcaatgtgcagccggtgcggctgatcgactttggccaacgcttttgcctgctgaccctggtgtgcgggccacgcaccgccggtgttggcggtggcttgaacctgagggcgttgtccaccgtgggggcgcaaaccaatacggtgttgttttcgccggtgaatgacatcaatgcggcgacgatctacaaaagcccacccggcaccgccaatatcgttaacagcctgggggctaccttgagcggcttgcaggtgacctatgtcccacctaccggaagcacgcccggtgcgccgaacagcacagtcaccagtgcactggcgaccatcgtcaactcggtggtcagcctggtccagaacgtcctggcgccgatcctcgaccctatcgtcaacacgctgctcgcagccctgggtgtcaacctcggcaatgccgaagtcggcgccaacctcagttgccacatgggccgcgcctacctggtgatctagctgatcggcaactccacacaaaacttcgcgccgtgctcaccattggcgacgctcaggcgtccgcccatgttttccacaatcccataactcaccgacaaccccagcccggtgcccacgccaatcggcttggtggtgaagaacggttcgaaaatccgctccagcagccgtgggtcaatcccgccgccgttgtcttccacccagatccgcacatggcggctgtcgtgctcgcaatgcaccgcgatccagggacgaaattcgggatgtttaccccgtttgctcaacagcgcgtcacgggcattgaccatcaggttgatcaacacctgttcaagctggtcgacatagcctttgacctggacctggaagtccgccggggtgatccgcacctccacccccttgccgcgcagaccctcgccgagcagtgacagcgtgccgtccaccgcctgcgacgggtcgaaaggcagttgttcgatttccgagcggcggccgaacacccgcatatggtccaccacccgcgtggcgcgctgcacctgggcatcgatgcgctggagtttttcgatgaggtagtcgatctgtgcatcgccattgcccagacgcttgagcacattgacgatggccatgcgcatcacgttcagcggctggttgatttcatgggccaggccggtggccatttcacccagggtggccatcttggcgctttgcgtcagttgctgctgggagcggcgtacttcggtgttgtcacggcccaccgcctgcacttccaccagcgtgccctgttcatcgaacacaccacggtccgaccagacccaccaggcgtgttcgcgtccaggcaattccaggctgatttcggcggtgctgaccgggaattccggggttaactgttcgatgcgttgcacaaaggcctggcgttgttcgtccgacagccagtgccccaggttcagccccggcaattgcgcgggcaggcattccaggtagttggccagcggtgtgttgccgaaggtcagggtcaggtcggggcgatagcggcagatcatcgccggggagtcttcgaccaggatgcggtagcgttcttcgctctgcctgatttgctcggcggccagggttgcctcggtgacatccagccacaggccgacggcttccaccggcaggccgaggtcatcgcgcagcaacttggcttcgtccagcaaccagtggtagtggccctgtttgtcgcgcaggcggtagcgactgcgtacgctgccttcacgtagtaattggcggctgcgctcgaagtacagctcgcggtcttcggggtggatcaaggacgccaggctttcgtggttgcactcggccaaggtccagcccagcagcggtagcaggctgtcgctgaaaaaggccggatgcagggcgccgtcgacatagcgctgcacatagatcacggccggtgagctggcgatcaggttgtccaggcgcgcatgggcggcggcggcttgcagttgctggttcttgatgtcgctgatgtcgagcatgaaaccgatccagcggcggctgtcgcccacgcccagcacctggccctgcacgcgataccagagcgggtggtgctcggcgtcggtgcgttgcaggcgcacgctggtcagcaagggtttgcccagggcctgcaggtcgtgcagacggctgtcgagggcctggcgatcggccgggtggatcagttccagccactggctcaggggttggcgggtaggaccgtcttccaggctgaggctgtgcagcaactgcggggccagctggatttcctgggtggccggcagcagctcccaccagccggtgccgagcaggccctgcaacgcctccatacggtcgagctgctggtgatagcgctgctcgcgcagccggctcagcaggggcgcggcgagggcggcggcaaggttgagccagtcgcggtcgcgggtgtgttgctggccgttgtattggccacagagcaaccaggcggcgacgccctgactgtcgcggtagggcaccaggaaaccgtcggcatcgccgaagatactgtgcaggcgtgggttatcgctgcgctcctgggccaggctcaacggtgcattgccattgacgctgtccaggctgatccccaggtgttggccggcctgccacaaggcgggggcgtcgtgggcggcgtactggctgtagatccgccagccgtggtcttcgtcatcgagcaaggccagggcaacgcaggggatgtgccagcgctgggccaggctgcgcaggtgctcgttgaacacctcgggcaggcgggccaggctgcacacccgcaattgctcgctcatctggcaggcgagttgatggttctgttcgcggtgctgggccagttgccggccggcgagcaaatcgccaacgtcctgcaggcgcaggctccaggcatcaccgtcgggttcgatccagccgcgggtatgcagcacctggccggttgcggcctggaagtccaggtccaggccctggtgttgccagtcggcggggctgccttcgatagtcaaggcgctgctggcgcacagcagttcatgcagtggtggccggcgctcgccgatggcgtgcatcgcgagctgtgggcgcaggctgccactgatgctcagcacgtggcctagagcatccaattgcacctgcagccctggcaggggcacacccggcatgtcgaggggcggcgcgctggcgcgaccgagcaggcgcccgaagagtttgtcccccgacgtcaaaactgcagactcgaactggcggagaggttggccggcaggttcgggacggtgccgatccccggcagcaccagtgccgggaacacggaatacaggttggtagtggggtagttgatcgccacggtcaacgtggtgccgttgtaggtgctgctgatgtaactgggggagaactggaagctggaagggatccagctcaactgggtgatcacggtgtttttggcgcggtcggtcacctgcgtcccgtacgcggtgccggcggctatcgggtccaccgacagggcctggcgcacggcctccgccgccgcctggttgaacgactgcatcaacagcaacggcaggctatagctgatcaacccgtagaacacggcaaaaaagatcgcgaagaccagggcgaactcaatcgccgccgcacctttttgctttccaggcaggcctgttttcatgactgcgtctaccctgacggctactacttgatatcagcatagaatcattcagcgaaaagggatgttttttacgtgatccatggcgtggtgattctgctctggctggggctctgtgcgttgcaggatatgcgtcagcggcaaattgccaatggcctgaccctgggggcggcgctgctggcgctgatcttcttgctgtggacgggcacgacctggctcggagcgcccgccagcgagggcggcagggccttcgccctggccttgctgctgaccttgcccggctatgcgctgggccgctttggcgcgggggatgtgaagctgctggctgcgctggccctggccagtacgctggactatttgctgtggtcgttgatcggtgcggcgctgtttcaggcgtgctgggtgcttgtgagtcaaaggcttagggcgcgtcgggggaggacagatgtgcaggtgtcaaccaaacagccctttgccccctttgttttgacaggatttgtgctgtgctggctttggatccattagtcgaacaaccgctctgccgctatgtacatagtcggaaagtgcgtctacgtttatgtagtatccggatgttttttttgtccaaatggatggggcgccctttggcttgccaggcatggagtagcgcgtgaacaagcttacctcggcggtaaaagtgctcgtggtcgacgatcagccgttgatcgtggaagagctctgcgaatttcttgaaggcagcggttaccgctgcgtcccctgtgagtccagccgacacgctttgcagcgcttcagcgaagacctcgagatcggcctagtgctgtgcgacctgcatatgccggacatggatggcatcgaactggtgcaggccatgcagaaggtcgcgggcaagcagcgcgcgttcgaggccatcatgctcaccgggcgtgccgacaaacaggacgtgatcaaggccctgcgcgcggggatctcggattactaccagaagccgatcaacctcgatgagttgctcgaaggcctgcaacgccaggaagcggcgctggaggagcggcaaaaggagctgcacctggggcacctgaaccagaagctgcaatacctttccgaatccatcaacgatttgtaccaggacctcgacaaagtgcggcgcagtcctggcgccggcttggcggatgagggcgagccggtcgtcgatgatgccgggccgatcgaaatcccgaccatcttcaaccagctgtcgccgcgccagctcgatgttgcgcgcctggtgggcaagggccagaccaactaccagatcgcctgtgaactggggatcaccgaaaacaccgtcaagctgtacgtgtcccaggtgctgcgcctcacccatatgcataaccgtacccagctggcactggccctgtcgccggctacctcggcgctgcggcaacgggtgacggcgcactgacggttactgactcctcccacccttggacgacccgccggattgcgactcgaagaactccggaattggatgtttgttgctgtccaaccaacgctgcaaggcctgctctcgttctgcgggcgtggtccgttgtggcgtggcggaagctgcgcgcccatcgacctgcaaggccatccagttttcggtctccgcctggtagggggacgatgggccaggttcgatggccagtgcgctcaggggtagcagcgccagtgcgatgaagtagtgtgctttcatcttgctctccttacttgagggtcaccggcagggtttcgctgaccgctgcgactttgcgtgtcgccacgccggaggccttgagtttctccgcgcgggcctgggcctcggtgaactgttcgcggctcaggcccaactggctgacaaccttggccgcttgcccccagtcattctggtaaatcaacagcgtgaccaggttgacggccgccagcgggtcgccttgcttgagttcgatggcggtcatgaattcaaagcgggcgtcttccacccgtagttggttgaggtacaccacgcccaagtcattgcggatcttttcgtcagtgggtgccagctgcgcagcccgttgcaagtgagtcatggccaggccgttgttgcccctggcggccgccaattgcccgaggccgtgctcgccttcggccgtcatgcaggtgccgagcaggctgcggtacaacggctcggcttcgctgcgcccgagcaggcgataagtgcgggctttgcgctggcgcacctggggcagtgactcgggcaggttttgcaggttggccaggctggcgtgcagcttgccttcgttggccaggtcatcggacaggttcagcgccagctcctggtccgcgctcggcttggcgcaactgccgggtgaggtcagtgccgcccagggtgattggccgttggtggcgcagccgccgagcatcaacagtgtcaggccggcaatcagtgctttcatcaaggtctcctcaaaagtggctcaacgcgcgggcgatgccgataaaggccgggccgccgagcacgatcaacaaagcggggaacagaaacaccatcatcaccaccgacatttttgccgacatcttcgagatgtattcctgcaagcgggtcaggcgtcggtcgtcgagcagttgcttgagggccagcagggacttcatcgcgccgccaccctgctggatcaattgctggaggatgatgcaggtgtcggtgaactcatctacctccagcaggcgcgcggtcttgcccagttcctcgctcagctccagcccggaatcgacccgtgccaggatcagacgcagttcatgggtcagtgcaggcagcaggcgctgcgcttcgttgcccaccacccgcagcgactgttcaatcgccatgccggattcgaacaggatgcgcagcagtggaatgaaggttgaaatttccttggcgatggtctgctggcgatacttggccgcagcggcgagcacacgtttgggcagcaggtagccgatgcacagggcaaacatcggcgcaatccatgcggggtccgcgtgtgggaacagtatctgctggccaagcaaggtgagacccagcagcacaatcggtgtaccgacctggaaggcggcgaacagcgaacgctggctggccttgcgccaacccacgcggttcagcagggtctgggtctcgttgtccaggctgaccgaacgctgtgccaggctgctgccgcccagttggcggatgagcgtggcgagtttgtcatcagtgcccatccgcccctgcaagcgctccgtgaccctgcgctcgcgccgccggttttcgagcaactggccacccaccaggacggcggcggcgagcaacaacaaggcgaaggccagcagtgccatctcaaacactcctcagcatgcgccacatggccagggtcccggccatgtccatcgccaatgccacgaagagcagggtgcgcccggtgccgtcgttccacatggtcatcaagtattgcgggttgaccatcatgaagtagcccacgatcaggatgggcagcccgcccagcacataagcggtcatgcgcgtttcaccggtcatggccttgagttgcctcgcgccttgttcgcgctcgcggatcatcttgatcaggttttccagcagttcgctggcgttgccgccgtagcggtggttgaccttcaggccgagggcgaacaggcggaattcgtcctgctcgtagaactcggcaaagtcgctcaccgagtccggcaggctgacccccatgcgcacgttgcgctgcacgcgggccatggcgtccttgagtgggttttcaacgccctcgacgccgcccagtaccgcgtccgccagggttctgccggacttgaggctgcgtacgctatggtcgagcaactgcggcagttgctcgaccatgcgctgcacgcgccgttgataacgccagctgatgtacacgcgcagtaccaggggcggcgccacgaccatcgcgatcagccccagaccgtcggccagcagccagccgaacagcgcgcctatcacccaggcgctcagccacaggcccaggcggtcggtgggcttgcccagcccggcgcgctggaacatgcgctcaaggccgctccacttggtattcggctcctgggtgtcgggctggccttcgccgaggcgctccaacacgcggtctgtctgggctttgcgcaggccatgctgaaactgccagaacgacaggccgatcaacagcaggcagacaagcagcaacaccggtcctgtcatcacgcgctccctagggctgcaacgccgattcgcggcgcagtttgtcgccggccgggttgagggcttcgcgcaggaagccaaagccggtacgccggtccaggcggaacagggtattggtgacgtacacgtcatcacgcacaccgaccacttccaccacttcgctcacgcagcgacgcccatcgggcatgcgcgtcagttggatgatcacgtccagtgcggcgcagatcatctggcgcagggttttttcggcgattacccgcccggtcagacccaccagggtttccaggcgcagcaacgcatcctgggcgttgttggcgtgcacggtgctcatggagccgtcgtggccggtgttcatcgccgtcatcacgtcgagcacttcgacaccacggatctcgccaaggatgatgcggtccgggcgcatccgcagggcgttgcggatcaggtcgctggacttgacttcgccgtggccctcggcgttcggcggacgggtttccaggcgtaccacgtggggatggcccagttgcaattcggcgacgtcttcgatggtcaccaggcgctcgtgggggttgatcagctggctgaggatattcagcaacgtggttttgccggtgccggtaccgccgctgatcaggatattgcagcgcttgcccacggcctcttggaagaactcgaaaatgctctggtcgatggtctgcatggcgaccaggtcactactcttgagcatgtccttgcggaattttcggatcgacaggcacggcccatccagggcaatcggcgggatgatcgcattgactcggctgccatcgggcaggcgtgcatccaccatcggcgaagactcgtccaggcgccggcccagcggtgcgaggatgcgttgcatcacgcgctccacgtggtggtcgtcgatgaagcgcaggtcgctctggtgcagcagcccatcacgctcgatgaatacccgatggggcccgttgaccaggatctcggtcaccgaagggtcacgcaacagcacctccagcgggccgaaaccggtgagttcgtcgacgatctcttcggccaggcgctccgtttcatagcgcgagatcgccaggcgcatgcgcgtgatgtactcggagactttgtcgacgacgaattgcgccagggactggcgcgtgccttcgagcaggttcttgcccgactcctcgatggcgtcgatgatgtagcgatgcagcaccagtttcaggccatcgtgatctgtgttgccaccggcagcgcgggctgggccgccaaacagtttttcgccgctcatcgtccggaccccaggaagcgttcaaaccagcgcatcgagggctttgccaaaccctcggagcgttttgccaggcgctcgcccaaggcacgtacggcctgggtcaagggttcgcgtggcgccagggcgaacagggtctgaccctggtttttcacattcaggcgcaattcggcgctcaggggcagcacggcgacgcattcgaggccgaagctcttttccagggcttcggtgtccggcgcgcaggctttgatatagcggtccaccaccagcttggcgtgatcgagcttcatgcctttctcgcgccagcggttgatcactgccaggttgcggcggcagtccagcacgttctgatcggtacaccacagcagtttgtcgcaatggccgacaaaggtgcgcagggcttcgctgtccggctgaccggtaatgttcacgacgatgtgctggaagtgttggcgcaaggcgctgagcaacatgtacagctcggcggcgctggtgagtttgagcggttcgtcaccggtggcgtacgccaggatgcgcaggccatccagggcggtggtgaacgcgctgttgatcatggtggtgtcgaggcggcgcagatgccgcagcgcatcgccgaaattgaacgtgctctccaggcccagcagcgccaggctgtcgctgcgtggcaggcccaggtcgagcagcagggtctgctgcccgctcttctgcaccaccagcgccaggtgggtggccaacatcgccccatcggcgttgctctgggtgccgaacagtacggtcaggccacccagttgggcgttggatgtcacggtcggcaggcgcttgctcaggcgccgcaccaggccggccacttcgctggagcgtgagccgtaggcgacaaaatcccgagcgccggcacgcatggcattcagcacaagctggttgtccatgccatcgcccagggcgaccacggcgagcatcggcttggcttccagggcgccttcgatcagtgcgctctgggccaccaggttttcgcggtccaggccgatgaacaccaggttggcgaaggtcacgtcggccagtgccagcagttcgtcgaggctgccggtgccggcgctcaccacttggccaagcggtgcaagggctccctgcagccactcaaggtcggtggtgttgcgggtgatggcgaggaaggtctggctcaggctatcgctcattgggaaagtccactgcgacgatcgaagttgccgttttccaggaaaaacagccggtaccagttcgggtcgtagctgcgcagtttttcgcccggcaaggacggcagttgggcgttggcggccaacggttgcaccaggtgcggcgtgacgatcatcagcagttctttttcttcgcggctgatcgtggagtcgcggaagaacgcgccgaggatcgggatatcgcccagccccgggaatttgtcgatggtcgagcggttgttggtgctgatcaggccgctgatcacaaagctttcgccatcggccagggacacgctggtgtcggtgcggcgtacggtcagggccggcacctggatgccttggatctgcaccgcgttgctgtagtcgagctcgctgacttccggcgccaccttgagggtgatgcggttgcggtcgatcaccgtgggtgtcagcgtcaggcggatgccgaactccttgtactcgatagaaatggtgtcgctgccggagctgggcaccgggatgggcacctcaccgccggccaggaaggacgcgctctgcccgctcatggccaccaggcttgggcgtgccagggtgtaggcaaagccgctgcgctccagggcgttgatcatggccttgacccggccaccaccaaaaccgacgttgaagctgtccgtgctcaccggcagtttgaacacgccttccgagggggacaggatgttggggctgccgaggaaaaagtttgcacccgtgcccaacagcttggtgctggcttccttgagcttgctgcgactgacttccacgaagcggatatcggtctgcacctggctgggcagcaacgggtcttgcgagggcgacagcgacacgctggtcagcgccgaggtggccttgcccttgacgaacaccatgctctggcgcggcgcgctggcgcaggcggtccacaccagcaggctggtggcgccgctgctgacaccggtgagcagaaagttacggtcgccgttgacccgcacatcggcgatcttcgggtcaccgatggcaaggcgcgtgattgccacgggtgattgcagttcctgctgcaggccttctcccacctcgaccacggcgggcaactggcccagggcgctgcaattacccggcgctgccagagccatgccgatcggcaggctcgacagcgtcaaggcgcaggccagctgcgtgaacatgggtgcgtagcgatggctcattcaaggcatccttgttcgatcacggggtttgtggcgccgcttgggcgccgcgaatcacttcgatgccacggcgcacgccaggcccaccgccaaccggcgcgacgcgtttgggcgggccggtcaatgccagttgagtgaattggtaaaggtcgcggttggcactttccagcttctgcgcggtgtcatcttcaccggcccagtagcggctgagcagttgctcctcggcactgcgcacggccaggcgcaaggtcccggcttgcgccgcgagcatcaggcggcttaataaaggctccggcacggccagcaccacggtgcgtgcggcgaggcggcgttgtagggcctgggcgcgttcttcggcggtcgctggcggtggcactgccggctggccatcgttggccaggcccaattgatcgccgacgctgagcagacgcatggccggcaggacgatctgggccgactgttcggcgttgccggcatcctggcgcaggaacagcagcacatccacgtaatcgccggggctcaactggcctgcggcgccgaccacctcgtccacggccacggccagcgcgcgctcgttggggcggatcatgcgcgagagggggccaccggcgttgaaactgtcctcgttgagccaggtaccggcgccgagggctctcagggggatacggccgatggcctggtcgagctgggtcaggctgccggcgggcgcggtgcgcagtttctcgacggacaggtcggcggcggtcagtggcgtaaaggcaggcacctcatgccgcaagacaactaccggctggcgggtttggtcttcagcggcggcgagggttttttcaacggaaacgacaggtgcggcaggcgctacgacgggctcgggtgtgcggctcaacacaagtccccagtacccggcaatcaatgccccgatcagcaacaagccggccaggaccatgctgatgcgactgttcatgacggctctccctttcccgttgcactgcacaccctgttaatccaaacgggttaatccgcaacctggctgtgatgaacatctaacgatttggctatttgaaggtagctcagctaggacgaaatgccattaccgctggaaaaaattatctggcgtataaagttggccttttaaattgcagtgttgtggcgtcaactttgcgactaatactttgtgattaatccgttcttacagttgtgaggccgaggtttgttgacaatgctctaatggcacgccgcgatcatctggtggtagagcctttccggctttcagtggcgttttagggagaagtccaatgttccttgacatgatgttgaagctgtatgtccaaacccaacttttctttcaacgcaaagacggcgcgtccgggattgagtacgcgatcattgtggccatggttgcattggtgatcgtcggtgccggttctgggcttggaactaagatcaaatcgatcttcgacagcgtcgccactaagatgaccacttgatagcctgcttatccatgtggaaacgccttattaacgttcttcctgtccaggtacagctatgagcgcctcttcgccttgccgccaacaaattcttttggtggatgacgaagaggacgccttgatcgaactcgccgaatccctcgaaaacgaagggtttgtgtgtttcactgccaattctgtcacgttcgccctgcaagaattgacacttcaccccgacattgccctggtcatcaccgacctgcgcatgcccgaggaaagtggcatttccttgatcaagcgcctgcgcgaacacacctcacgctcccacctgccagtgattgtgatgtcgggtcatgccgaaatggatgatgtgagcgacatgctgcgcctgcaggtgctggacctgtttcgcaagccgatctacctggtgcggttgatcgatacgttgaacaacctttttcctctgcccaaaacggtgtagtgagctggcctggtaaaagcgggagtgctgcgcactccaacgcggggcaagcccgctcaccacattagagctggtagctgaagctcagcgaatagcgcggtcgacgatcgaagctgtccagggcttcgtccgacatcggcttggcggcttccagcgcgatgttgtagtacttggcgtcgccaaagcgcaggcccagcgccgccgatgacaggtcattgcccttgaccggcaggtcgttgaaccaggtcttggcgcggtcgaacaccacatagggttgcaggatcctcacccaatcaccggcgcggttgtagctgtagttgacctcgtatgccacgccccagcctttgtcgcccgtgccttggtcatcggggtagccgcggccgaaactctgcccgccgaaggtggcgcgctcgctgtccggcaggtagtcgttgctccagtagagcgcgccggacagcacgccttgccaattgccgaacagcttgttgctctgcacgccagacaggcgcaggcggaagaagtcgaggtcgggcttgaggccgccgaagtcggtgcgtgtcttggcacccatgccgttgatgccttggtagaggccgccgctgatgatgcgcaactgcgtgggatccgctttgcgccagtcgccctcgaaggccagggcgcgcaggttggtttccagctcgaaacgctgagggaaaccgctgagcttgtaccgggtggtctggtcgacggcgtagaggcgggcgccgaggttcagcgattcgctgggcgaggcgataaaagggtggctgaggccaaaggagtaacggtcgatttcctggtgcggcttgagttccaggccatcgcccagttgcaggctggtgcttgggtcggcgcggtagcgttcgcccgagagcgccagttgggtgccttcggcattgaggaactggctataggtcgcgcggtagtagtgctctttatcctggcccggcggaaacaggccactgatgctcagttgctcgcccatggaggtccacgaattgctggtgccggtcagcagcgcctgggtgccgccacggctggcctggttgaggctcatgctggtggtgacgggcttgcggctggcggtgacttgcatatgagtgccgccatcggtggtgctggggggcggcacttgagcctgcacggtcaggccagggatcgcactcatcagcgtggtgtagcgttcgaaggtcttgcgcgtgagcgggcgttcggcctggagttttcccgccagtttgtcgacataggaggagactgatccgatgtcgccttgcaactggtaatcgcggatgtagccctccaccagcaccacctgtaccaggccgttttcgaagtgctgttccggcaggaaggcgtaggacagcaagtagccgtcttcctggtagcgccgggtgatgctgcgggtggcttcgatcaattgcgccaggttggtttcatggccgatcagcggcgcgaatgcctgggcgacgtccttgagcgggtagacggtgccgccgtcgatctgcagtttgcgaatggtgaccttggtgtccatcatcagcggctgcccggcggtgggcgccggtgttggcacctgggtgggcgtgccggtaggccggtaggcgtcgacgggcagattgggcacgggcaggttgcggatggtgtcgttgctattgaggaaagtgggaagggtatcggcgtgggcgtaagcactgagggtgagcaataacaacggcgtcaaagcgcgcataggacactccatggtcaaaactgcagcagcgtttcgcagattcccgccgggctctgggggcgcggttcgggtgtctccaggggtcgatcattgacccaaaaaaaagacgagagacttagtggggtctctcgtctcaaccaagcgtaggcgctgtaggtgaggccgtctaatcggccaggtgcaattctattttgtgccgctcaggccacccaacagcccgccgagaacaccaccgtttgcattggcgccggcccccgcgcccgccgaggcaccggcacccacattgagaccgccgccgagcaagccgccaccggtgttggtgccgccggtgaccaggccgccgatcgacgccacggtgccacccactgcggtcacggtgccgcccagggcattggtgaccgggttggcgttggtggcgctgatttgcccgcccaggctgctgaccgcgccaccgacattagtgaccaggccattcaccgggccacccaggccggtggcgttgccgacgttttgcgtcaagctttgcacgccgctggtgacggggttcagtgcgccgccgatctggctggtcagccctgcaatgggggcgcctgccgccatgtttggagcgccgctgccgccgaggagggtacccagggaggccacggtggtgccggctttgacaccggtgacgccggtcgcgctgaccacgccattactgctgcctgcatccaggccgccaccggcaccggcaatcacgccaccgatcagttcaggcaaacccaaccggttgatgctgccgcctgtaccgccgccgctgttgccaccgttgttgccttcatttgggtcgacataaccgccagccttgctcaccacggtgccgacgccattgagcacattgcccaccgcacccgtcactgggttgccagtgccacctgcgccggcgacgttatcgcccaggccgtcgacggtatcgccaactttttgcagcaggccgcccacaggcttatcaagaccggtcgcggtgccgactttacccgtggtgttttccaccagggataccaccggtaccagcactctcgcgccgacggtgttggtcaccgagcccagtgggccggtggtgctggcggtgctcagggtgtcgcccagcatggtcacggcattgccgaccttgccgacgacgttgccgactaccggggctgcgccgctgacgaccggcactttacccagcagggtggcgacgttgctaccggtgacggtcacgccatcgcccaggtcggaaaccccattggccacgccggcgacggttttgcccaaggcattgctgtccgtgccaagcgagcccaggccatccgacaggccggtgccgatgctgccgaccgcgttgccggtggcattcaccaggccgcccgcagtggcgccaacgatgggcaggctgccaagggtggtgcccaggctcctgacggtgccgccgaggtcggtcacggtattaccgagggtgtcgaccacggtggcggtgaccaagggggtcgtgctgccgcctgggttggtgccaggatcggtgccggggttggtccctgggtcggtgccgccgcctgtcccgccacctgcacccgcacccgaggaggacccaccgctgtgatgcccgccaccaccgctgctgcagccgccgagtgccagtgctactgccagggccagcgcggtacttgctttccaaaacacgacttgagttttcatgattgagttccttgcacctgtacaaccttggttgtcttcaaacgctcgctacttctggggatagcgatgcgtttgtccgtgtggctatagcagccccggcggtgcgttctctcaatgctctacttggtattaacgatttatatacagcagcggtgtaccggttaagcaactaatgccaagggtataagggaaggatgtatcaagatgtatatatgttataaatcaattggttaaataaaaaaagcggacttcatgaagtccgctattacttagtgtgtatatatacaattaacctgtttgtttcaggcgatcggccgccacttgcctaccatatgttcaatatcgcccgcgcctttcaaccacaacgctccgctggaaccggcggcgctggccaataacgtcacttcaccgggcaggcgcacgggtttcctgaactcgacgtcgatctcgatattggcggcgggcaagtgttcgccgagcgcggcgagggtgtgcgccttgttccacagcccatgggcgatggcctgggggaagccgaacagcttggcggtcagggcgctgaggtggatcgggttgtaatcaccggagactcgcgcataacgacggccgatatcggcgggggctttccagcgggtcagctcgctgacctgggcgggagacggttgggtgatagcttctgtctcgccttccagcttcacgccccggcacagcatgcggctgtcggcttcccacagcaggccgagggaatcctcaaccgtggtgatcagatcgaaggttgcacccttggggtggggtttgaggttctgcgcgtgtacagccacgaaaaggtcgctcacaccccccaaggggcgatgaatgcggatgcggttactcaggtgaatcagccccagcagcgggaagggaaaacgtttatcggtgagcaactgcatctgcaggccgaacgccaggatatgcggatacgtcgccggcaggattgggccgtcggcaaagccgcagaccttgcgataggccgtcacccgctgggcatcgatgctgacccggcagcgcaacccgaactcgggcaatgtactgccggtgattttgcgcttgagggctgcgcgccaatacagcggcggcagagacggtgctgtgtctaacgtcttccattgcatgctcacgctcccaacagactttgcccacacacctgcaacgcttgcccgctgatcgcaccggagcccggttggcccagccaggccaccgcttcggcgacatcctgcggcaggccgccctggcccagcgaactcatgcgtcgcccggcctcgcgcaaggcgaacgggatatgcgcggtcatctgggtttcgataaaccccggcgccacggcattgatactgatgccgcgcgccttgagcagcggcgcccaggcctgtgcgaggccgatcaagccggccttgctcgccgcgtagttggtttgcccacggttgccggcgatgccgctgatcgacgccagcagcaccacgcgggcgttgtcatgcagggtgccgctgtcgagcagcgccttggtcagtacctgcggcgcattgaggttgacggccagcaccgcgtcccagtattccggggtcatgttcgccagggttttgtcacgggtgatacccgcgttgtgcaccaggatatccaggccatcgggcaggtgttcgatcaattgggtggcggcgtcttcggcgcagatatccagcgccacggtgcgtgcacccaggcgtgcggccagggcatcgaggtcggccttggcctggggcacgtcgagcaggatcacctcggcgccgtcgcgggcgagggtttcggcgatggatgcgccaatgccacgggcggcaccggtgaccagcgccttgcgcccggccaggggccgtgtccaatcttcgaccggcgtggcgcaggcctccaggcggatcacctggccggagatataggcgcttttcggcgagaggaagaaacgcagggcgccttccaactggtcttcggcaccgtcgccgacatacagcaattgcagcaccccgccgttgcgcagctctttggccagcgagcggctgaagccttccagggcgcgctgggcactggcagcgaacggatcgccgaggttttccggcgcacggccgaggatcaccaggtgcgcactgttatccaggtttttcagtagcggttggaagaactcgcgcaattgcttgagctgatcggtgtgttgcaagtcgctggcgtcgaacactacggccttgagcttggggccgtggccggggatccacgtcgacgtctctgcgccgtaggtgtagatcgcgtcggtgagcttgttggcgaacgcctgcaccttgctgaccagtgcaccgccgcccagcagcaatgcgccttccaccgggcgcaggcgcccggcttgccagcgttccaggcgtaccggcgacggcaggccaatggcggcgaccagacgatggccgaggcttgagttggcgaagtcgatataacggtcagacatggaacgctctccgaaggctggggttcaaagggttgaccatcccagggtagcagtcgttcgactaggctcagtaatccagcccacaacagacagagggagctttccatgactcaattgcgccgtgtagcgatcattggcggtaatcgcattcctttcgcgcgctccaatggcccttatgccacggcgagcaaccaggcaatgttgaccgcggccctcgaaggcctgatcgaacgctacaacctgcacggcctgcgcctgggcgaagtggctgccggcgcggtgctcaagcattcgcgggatttcaacctgacccgcgaatgtgtgctcggctcacgcctgtccccgcaaaccccggcctatgacattcaacaggcctgcggcaccggcctggaagcggcgttgctggtggccaacaagattgccctgggccagatcgaatgcgggattgccggtggggtcgacaccacctccgacgcgccgatcggcgtgaacgaagggctgcgcaagattctgctgcaagccaaccgcagcaagtccatggcggataaattaaaagtcctgttacaacttcgtccccatcacctcaagccggaactgccgcgcaacggcgaaccgcgtaccggtttgtccatggggcaacattgtgaattgatggcgcagacctggcagattccccgtgccgagcaggaccagttggccctggaaagccatcagaaaatggccgctgcttacgccgagggctggcacaacgatctgctcacgccgttcctgggcctgacccgtgacaacaacctgcgccccgacctgaccctggaaaaactcgccgccctcaagcctgccttcgaacgcagcgcaaagggcacgctcactgccggcaactccacgccgctcactgatggcgcatcgctggtgctcttgggcagtgaagcgtgggccagggagcgcggcttgccgatcctcgcgtacctgcgcgatggcgaagcggcagcggtggacttcgtcaacggtgccgaaggcctgctgatggcgccggtttatgcggtaccgcgcttgctggcgaggaatggtctgacgctgcaggacttcgattactacgagatccacgaagccttcgctgcccaagtgttgtgcacgctcaaggcctgggaagatgcggactactgcaagacgcgcctgggacttgacgcccccttgggctccatcgaccgtagccgcttgaacgttaaaggcagttccctggccgccggtcatccgtttgccgccaccggtgggcgtatcgtcgccaatctggccaagctgctggacgcggcgggccaggggcgtgggctgatttcgatctgcgcggcgggcggtcagggtgttacggcgatcattgagcgctgaaactggcatattggatgcattcttaagtgatcaacggtcggtagcctctcccaccggcgagctgattgccgtataacgagtgccatacgcgtatttggtaataaaggacccacaataaaagctgatgaagactcctaaacgcattgaacccctgatcgaagacggtctggtcgacgaagtgctgcgcccactcatgagtggtaaagaagcagctgtttatgtggtgcgctgcggcaacgaattgcgttgcgccaaggtttacaaggaggcgaacaaacgaagttttcgtcaagcgtccgaataccaggaaggccgtaaggtccgtaacagccggcaggcgcgggccatggccaagggctccaagttcggcaagaaagaaaccgaagatgcctggcagaacgccgaagtagcggcgttgttccgcctggccggtgcgggcgttcgcgtgccccagccgttcgacttcctcgaaggcgtgctgctgatggagctggtggccgacgagtacggcgatgcggcgccgcgtctgaacgacgtggtgctggagccggaccaggcgcgcgaataccacgccttcctgatttcccagatcgtgctgatgctgtgtaccggcctggtgcacggtgacctgtccgagttcaacgtactgctcacgccaaccggcccggtgattatcgacctgccccaggcggtggatgcggcgggcaacaaccacgcgttcagcatgctggagcgggacgtgggcaacatggcttcctatttcgggcgttttgccccggaattgaagaagaccaagtacgccaaggaaatgtgggcgctgtatgaagccggcaccctgcacccggccagcgtcttgaccggcgagttcgacgagccggaagaactggcggacgtcggcggtgtgattcgcgagatcgaagcggcgcggctggatgaagagcgtcgccaggcgattcgcgcggcggacgatgcgccgccgagcaaggtgccggacgaaccgccgccgccgccgtggatgcagtgatttccagataactggaaatcacaatgtgggagggggcttgcccccgattgcagtgggtcagctacagataagccggctgatccaccgctatcgggggcaagccccctcccacattggatttgtgtacattcggtcaggcgcagcagcttccggacgccaactccttgagaatcggacaatccggccggtgatcgccttggcagtgctccaccaggtcctgcaaggtatcgcgcaactgccccagctccaggatcttctggttcaactcatcgatatgctggcgcgccaaggcttttacatcggcgctggcccgttggcggtcctgccacagggtcagcagcttgccgacttcctccaatgaaaaccccaggtcgcgcgagcgtttgataaacgccagggtgtgcaagtcatccgcgccgtacacgcgatagccgctgtcggtacggtgggcggccttgagcaggccgatggattcgtagtaacgaatcatcttggcgctgagcccgctctgacgggcggcttggccgatgttcatgggcgttgatcctccaaatccttgggtttccaagtcttcaacagtaaggcattgctgaccacgctgacactcgacaaggccatcgcggcaccggccaataccgggttgagcaggccgaatgcggccagcggaatgccgatcaggttgtacacaaaggcccagaacaggttctgacggatcttggcgtaggtcttgcggctgatctccagtgcggccggcaccaggcgcgggtcgccgcgcatcagggtgataccggccgcgtgcatggccacgtcggtgccaccacccatggcgatgccgatatcggcggcggccagggccggggcgtcgttgatgccgtcgccgaccatggccaccacgccggtttttttcagctcggcgacagtagcggctttgtcggcgggcagtacctcggcgtgcacatcctctatgcccaaggcctcggcgaccacgcgggcgctgccgcgattatcgccagtgagtaaatgactgctgatgtgctgggccttgagttgctgtaccgcctccagcgcgccgggcttgagcgtatcgccaaaagcgaacagccccagcactcgcggttgggcgccttgcgcgatcagccaggacaaggtgcgaccttcggcctcccaggctttggccgagtcggccaggccccccgcgttcaaaccgttttcttcaagcaggcggcgattgcccagggccaactgctggccattcagcgtgccagcgatgccgcggccggtcagcgattggctggccgtcacatcggctacctccaacccttgctcgctacaggcatccagtacggctttggccaaagggtgttcactgccgcgttgcagcgcgccggcgtgttgcagcaggagcgcttcattgccatccacggctgccagatgagcgatctttggcgcgccggaggtgagggtgccggtcttgtcgaagaccacggcgctcacttcatgggcgcgctccaaggcttcggcgtccttgatcaggatgccgtggcgggcggcaaccccggtgccggccatgatcgcagtcggtgtggccaggcccaaggcacaggggcaggcgatcaccagcacggcgacggcattgatgatcgcggtctccagtgacgcgccgtacaaccaccagcccaccagggtgatcaatgccagtaccagcacggccgggacgaacacctggctgactttgtccaccagcttctggatcggtgccttggcggcctgggcgtcttccaccagacggatgatccgcgccagtacgctttcggcgcctagggccagggtgcgcaccagcaggcggccttcgccgttgatggcgccaccggtgactttgtcaccaggttgtttcggcacgggcaggctttcgccgctgatcaaggcttcgtcggcgtggctttggccttcgaccacttcaccgtccaccgggaagcgctcgccgggttttaccagcaccaggtcattgagtttcaacgcgttgatggcgacatcttcttcacggccgtcgagcactcgaatcgcccgctcggggcgcagggcttccagggcgcggatggcgctggcggtctggcgcttggcgcggctctccaggtatttacccaacagcaccagggcgatcaccaccgccgacgcttcgaagtacaggtgcggcgccatgccagggtgagcggtgagccattcgtaaatactcaggccgtaaccggcgctggtgccgatggcgaccagcaggtccatattgccggcaccggcccgcacggctttccaggcagcgatgtaaaagcgtgcgccgaagatgaattgcaccggcgtggccagggcgaactgcgcccaggccggcagcatccaatgcacgccaaagggctccaccagcatcggcaacaccaacggcagtgccagtaggatcgccagcagcagcgcccaccgctcgcggagcaggcgccgggcctgatcggcatcggtggcggtttcgctttggggcagggtggcggtgtagccggctttgtcgacggcagcgatcagcacgcaggggtccatctggccgagcacttcaacatgggcgcgttcgttggccaggttgacgctgacgctttgcacccccggcaccttgcccagcgcgcgctcgacccggccggcacagctggcgcaggtcatgccactgatgggcaggtcaaaggtggtggatccattcatggggcagtcctccaggagaagttgcccctagcatcaaccttgacctgtggggaaggtcaagcgcgatcgttcccacgctcggcgtgggaatgcatccagtgacgctctgcgtcacgattctttttgctcagtattccaatgcggcgggtttcagatacatcccgtccggcccttgggcaatgcgcaacttgcgcacatcaccgaccttcagcgtgatgttctgcgcaggcggcgccagcaggcccggtaggcaacccggggcctggcccggcaacagcttcaagcgcagggacaggttgcccgccggcaggttgaacgaagtggcctgctcctggaacagccggcccgccaactggtcattcaggtacaggccgatctcgcagttggtcggcacttccaggcgttcccgggaaatgatcagcaccgcatagtcttctgcggcgagggcttggggcgctgcggccgacaggctcatcaggccggcaagggcaaaaaacgaccagcgcatggcgaatgctccgtggtttaaatcgacgatgagtgaagcttggcctttgaagcggccaaataccagcccggcagacatttgcggaacttgaccttgccatcgtggcaaggtcgagactgggtccaacctcatcaaaggagtcatgtcatgcaagtattcagcgttgaaggaatgacctgcggccattgcgttcgagcggtgacccaggcagtgcagggccaggacccggcggccagcgtgaaggtcgacctggcagcaaaggaagtgggcgtcgaaagccgcctgtctgccgagcaagtgatcgaggcgatcgcagaagaaggctatagcgccaagcttgcctgaggcggaaaaatagttagcgagctatcgtgttcaatgcacccaagcgcggctagactatcgggctgccgactcacttgggtgcccgatgaacctccgcataatcctgatcctgggtgccttgagcgccttcgcgccgctggcgatcgatttttacctgccgggcttcccggccatggccaaggccttcgccaccgatgaaaaacacatccagctgaccctggcggtgtacttcggcggcctggccatcggccaattgatctacggcccgctggcggaccgcttcggtcggcgcggcccgctgctcagcggcgtcaccttgttcaccttggcctccttcgcctgcgcctttgcgccgtcactggaatggctgattggcgcgcgtttcgtgcaagccctgggcggctgcgcgggcatggtgatttcccgcgccgtggtcagcgacaaatgcgatgcggtgggctcggccaaagtcttttcccaactgatgctggtcactggcctggcgccgatcctcgcaccgttggccggtggggtgatggtggggctgtggggctggcagtcgattttcctggcgctgtcgatattcagcgtgatggcggccatcgcggtcgccgtcgggctgccggaaacctttccggcccatcagccgcgccagccgttgtccggctcgttgcgtcgctatgcggccttgttgtcggaccgggtctacttgggctacgccctcaccggcggtatctcgattgccgggatgtttgcctacatcgccggttcacctttcgtgtttatccaactttacggcgtgccagccgagcattacggctggctgtttggctccaacgctgcgggatttatcctggtggcccaggtgaatgcgcggctgctgtccaagcgcgggccggcgtttctgctgtcgcgcagtgtgtgggtctacctgctggcggcgttgacgttgctgggcatcgcggcgttgcgcaccgatgcgctgtggccattgctggcgccactgtttatctgcatcgccagcctgggctgcattttgcccaatacctcggcctgcgccatgagcgggcagggcgcacgggccggtagcgcttcggcgttgctcggctgcattcagtttggcgtggccgccggcgccgcttcgttggtcggcgtgttgcacgacggcacggcgatgccgatggccatggtcatcagcttgtgcggtgtattggcggtgacgattgcgatgtcgacccagcgcctgcaacgcaaacgggccttgcaggcgcaggtctgaagagcgggtcagccagcggcagaacgttgctggctgatgggaaaacggtggggcgcctggatacgggcttgcagggtgtcggcaaaggcacgggcctcggcctcggtgcggaaggtgaaggcgtcctggtcgagacgcacctgccatttattgcctgcggattttgctaacgcttttatcaggattttcattgctgacttcctcacgtaaaagaatcgtggcaaaggcggccaatataaacccgaatacgctcacacatatgacaaagatcaactctctgactagcggtgtcgtccattactcacatgaataatggacgacactgacagccttttttcagaacccttccagcacgatcttgcccttggccttgccgctttccagcagcgcatgggcacggcgcaggttggccgcattgatcacgccgaagtgctcgcctaccgtggttttcagggtgccggcgtcgatcagttcagccacgcggttgagcaggttgtgttgctcgatcatgtccggcgtctcgaacatcgaacgggtgtacatgaactcccagtgcaacgacaggctcttgcgcttgagcttgctgacgtccagcgccttgggatcgtcgatcagcgccagcttgccctggggttgcagcgcttccaccagttggtccaggtgatggtcggtctgggtcaggctggcgacgtgggtcacgtgcgggtggccggcggctttcagcgcttcgctcaacggttggctgtggtcgatcaccaggtcggcaccgagggccgtggtccacgcctgggtttcagggcgcgaagcggtgccgatcactttcagggcagtgagctggctggccagttgggtcaggatcgaacccacaccaccggcggcaccgacaatcagcaggctctggccttcatcctgattaccctcacgcacttgcaggcgttcgaacagcagctcccaggcggtgatcgccgtcagcggcagcgcggcggcttcggcaaagcccaggcttttcggcatatggccgacgatgcgctcatccacggtgtgcagttcgctgttgccacccgggcgcaccagggatcccgcgtagaacaccttgtcaccggccttgaacagcgtcacgtcgctgccgacggccttgaccacaccggccacatcccagcccagcaccttggcggcgccgttttccggggcgacgttctggcgcaccttggtgtccaccgggttgaccgagatggctttgacttccaccagcaggtcacgcgggccggcgacgggggctggcaactcgatatcttgcaaggcgtttggatcgttgatcggcagtgaggcgtagtaggcaatggctttcatggaggctccgaaaaaaggatggcgatcaggcaagaaatttcaggcgcttgagttcgaagtgttcgatcacatcagcggccttggcgcgaaagttttggatatgcgcgctctggtcgtggtcggcgagcgccgcgtcgtcgctccagcgttcgagcatgtagaaggtctcgggatgttgcaggtcctggtgcaggtcgtactgttcgcaaccggcttccaggcgcgtgggttccagcaggtcgcgcagcaagggttccagggtggcctgttggccgggtttggcgatcagcgtggcaatgacgttaaaggcagtggacatattcaactccagacacgtgatgaacgggatgcacagatgattggctatttcccgcgcagataaaagcggctaaaacagcaggctgtttcaatgaaattttgataatgagcgggaatgcatgctgcgctttgatgatttgcaattgtttgtacgggcggcggacctggggagcctgtccgccgccgcacgggtgatggatttgtcgcccgccgtggccagcgccgcgctcaagcgtattgagcagcaactgggcacgcgcttgctggcccgctccacccgcagcctgcgcctgaccgccgaaggcgagggcttcctggaatatgcccgcgcagcgctgagttcgctggacgaaggccgccgtttattggccagcggccaggaccatgtcagcggtgtgctgcagctgtcggctccgtcggattttgggcgtaaccagttgctgccgtggctggatgaatttcagcgtgagtacccgcaactcaccgtgcgcctgctgttgggcgatcggattgccgatctgtttcgccagccggtggatattgccctgcgttacggtgagcccgaagattcgagccttatcgcactgcccgttgcgccggataacgtacgggtgctgtgcgcctcccccagctacctcgcacgtcatggtcagcctcggcacctggagcagttggcccagcacaattgcctgctctatatgctcggcagccgggtccatgaccactggacctttcacgacggtaaacgcgaggtcagcctgacggtgaccggcgaccgcttcagtgacgatgccgacgtggtccgccgttgggcggtggcgggtgtggggattgcctacaaatcctggctggatgtcagcaccgatgtgctcgcggggcgcttgcgcctgatcctgccggagctgcgcggtgagcgcacgccgctcaatctactgtgtgcccatcgtgcgcaactgagcaaacccatcaacctgttgcgggaaatgctcgtgtctcgctgtgcgacgttgaccgctcaattgccggagcgattgaacgcgatgtaacgccctccatcacagcaggaaatttcattcaggttctgtccctatccacgctgtcagacgccgtggaaccggtggtttgcgcccctatactttggctcccgcatcagtagaaaaataagccaacagggagtgaaaagatggaagcagcaccttgcatcagtcagatcgccagcttgcttgccgagcctaaacgaaccgccatgctgtgggccttgatggacggttcagccaagtcgccggtagaactggcgacgctcgccgggttgtccgcgacctccgcccatgcgcatttggcgcgactgaccgcaggcggtttgctgcgtgtggaagccaggcgtggcaagcgcctgtttcgcgtggcggcgccggatgtcagtgccgccatcgatgccctggccaggaccaccatggcctgcgcagcgcgcagcgcgccggatgctttgccgccgaccctgcttgctccgccgtcgttacgtcatgcccgtttgtgccatgggcaccttggtggcgagttgggggcgcagttatatcaacatctgctggaagcaggctggatcgagcgctacgaacagcgtaccgatgtcacggtgaagggcgcgaagcgcttggcaaaactggggatttttacccaggcattggcatcgccgctggtgtgcagctgctttgactggagccagcagcagccgcacctgggtggtgcgttggggacggggttgttgcaactgtttttgcagtcgaactggatcagcgtgatcaatgagtcccaggccttgcaggttcatgccatcgggcgacaggaaatcacccgattggccgtgccaccaaggagctgaccgtgtaggagccagcaagccgcctcctactgggttacggttttaccagtcgcgcatccaggctgttttgcgccaggcgtttggcctggtcctgggtcatgcccagtgaggtgtacaacgcgtggaagttctcggtgacataaccgccgaagtacgccgggtcatccgagttcacggtcaccttcacaccacgttcgagcatgtcgaggatgttgtgctgggccatgtcgtcgaacacgcacagcttggtgttggacagcgggcacacggtcagtgggatctgctcgtcgatgatgcgctgcatcaggcgctcgtcttcgatggcgcgtacgccatggtcgatacgctggattttcagcaggtcgatggcttcccagatgtactccggcgggccttcttcaccggcgtgggcgacggtgaggaagccttcgtggcgggcacggtcgaacacacgctggaatttgcttggcgggtgacccatctccgagctgtccaggcccacggcgacgaacgcgtcgcggaacggcagggcctggtcgagggttttttcggcttcggcttcgctcaggtggcgcaggaagctgaggatcaagccgctggtgatgcccagttgctgctcgccatctttcagcgccgcagcgataccgttgagcacgacttcgaagggtatgccacggtcggtgtgggtttgcgggtcgaagaagggttcggtgtggatcacattctgcgctttgcagcgcagcaggtaggcccaggtcaggtcgtagaaatcctgggaagtgcgcagcacgtcggcgcccttgtaatacaggtcgaggaattcctgcaggttgttgaaggcgtaggccttgcgcagggtttcgacgtcgttccacggcagcgcaatcttgttgcgctcggccagggcaaacagcagctccggctccagcgagccttccaggtgcaggtgcagttcagccttgggcagggcgttgagccaatcgtacattttctaaattctcatcaggtgcaatggcggcattctacaggccatggctgaaataatcggcaaaacctgaccagcaggattgttttcgttgcattcgcgcaagggccttgtgaactaaggtgtaacgaaacgttagcggcttggcgcagtctgtaccccatcaatgactgatttgccgtactaaaaggcccggaatgctcacatccctcaagcaagaaaaattcatgctgctggcgctgattgccgccatcgccgcctacccgctggagcactggatgctcaatagcgggcaaatcacggcgctgttggccggcgtggcgctgatcggctttatcgtggtggcgtcgatgcgcgtggcccatcacgccgaacaacttgcggaaaaggtcggtgacccctacggcaccatgatcctcaccctcgccgccgtgctggtggaagtggtgatcctggcgatcatgatgagcaacgagccgtcgcccacgctggtgcgcgacaccatctattcggcggtaattttctagacacactccgctttggtgtcaaagcccttaggctttgacctgctcttgctcttgatggggaagattaagatgtgtatttgattgggagtgctcttgcattgtccttcctgacacacctctatctatggcataccccggaagcccggagattttcctcagcccgtgtttgtgactctgcttgaggtctaaggatgacttgctgtgtggggagcatccttgccgcgagttcatacaagatcagcgacacgcggctatctgtcaggcatttggctgggcggaaagaaatggcgttacgtatgtgacgaactcagcatgaggagtgcgatgctcattccaccttggagggtttgatgccggtcgatagcgtaagtcgcatgtcgtgatcatcaaccgctccttggcgcgtgaaacacccacaaagaagccgcaacgctcctcttggactttgccccaaaatgtctgtgtttctacaccgatcataattacagagtggaattccaatcctttacttttatgaatcgtcagaaaacggactgcttgatcgttggagaacagatcaagtgctttgagcaaatccggttcttgctcgagcagtttctcaatttgctgtctcgtgttcttgataacctcgttcaatctggcatttgcttcgtagtcagaagaaagggtggtcagcacgggtaggccgatgttctttaggaacttcatagttagctcccaccatcctgaataaggcgcgtcagatcgggccaattttttcacttccttgcgctgggcaagatagaggcgctcgaagtttctctggatctcagattcaccgtcctcgtcattaaatgaaaccagttgctccatcaaattgatccacgccttcggttctcgctcccgatacaggcatgataggtagtcaataattaggcgagcggcgggctcattaactagatcttgagactcatgctcgttgcgaaagggaattcctctggctgccagttgctccatgagtagggtgccgtagaggtctatctgcctgggaaaaagaatcgctatttctggtaggggtattttctctacatctatccacttctggatgatgttggccaacgcggctgcttcgctgtgactgttgtcgtagtttcgagcgaggagttcgccgtcgtttccaatgatcaggtcatctgccatcaccgcagcaggatcaagtgttcgaatgatctcgttctgcatccgcaaaagccgaggcttagatcggaagtttcgatatagattgagtggtcgggcgtcgaagtcctttgcgtagtctataaatatgccatccagtgctcccgcccagcccataattttctgtttggtgtcaccgacggcggtcaatcgaattggcttattcatgaagacaagcttcagcagtgcgtactgctcagtagtgcagtcttgaaactcatcaaggaatacatcagcgtaggtctgacaaattgcatttcttgcaaccactgaattgctcaagatcttcgttgcgagaggtatgagctgcgcgaacttaatttgtttgccttgaattggttcgtcgcctatggagtagtttggctcaagagagtccccgcccgtgagcacgggtctaaacctatcaatgatgcgcttggcgaagccgtgaaaggtgtagctgtcgaagcgtgcagccagatcaagtccgcatctgcgacgaatccgttccttgaggtttatgctcgcatcgaccttgaaggagatcgccagtattcgcttggggtatcggcagtttccggtgcgtagcaaaaagtctgcacgctgcgccagaacttccgttttgcctgcgcctgggcctgcggtgagcgcgagcgactttccaagctccctcacagcgagaagggcgtttgtttccaaggtcaagccatcggcgactttccatacatccgcgctgatcattctgggatgtcctccagcgccgcgatgattgcgtcggctaaacgatctagcgatggaggaaggctttttagcagatcttcgtcagtcagcttcgcaagggcggagatgtgtgctgcgggcttgctacctaatttgaattttgagtgataggttccaaacagttcctgctcatttgcatcatattgaccggcgttacagtgactctttccgagcactgccttaagagttgattcgtcaggagggcttcgggaaacaccgtacgcttttgggtaggctagaagcatggagaaatctagatccataggatccgaaaaataaacgccccgtttttcaagttcggaaaaaatgcttattgttccttcctcaaaccagtggtcggttcgaactggaagatcttcgttccacttagctatttcccagttaggtagttttttatctggagaaaactttgccaactgattattgacgttgctaatccgcccccacccaccttgatgtcgtgcgacatcgagatccaagagggtcacaaaaggcgtttctaatgcagccagcaagcgccagaaatgattgacgtggcgtccccccagtggagcgattgtcaccgctgactcatcaacaggtgcgcctttcgcttgaagtattcttggaaggacaatttcctcactgtcaccttcgcctagtacaaccagcctagagaaataaacttcaggaaaagcctgcacagcctctcggacaaacttatgagcctcatcctctttgtcgggtagtgctatgcaggtgaccttagttgcacggctcgcagccaagcgtagatagcggatgttctcgggatccacgcggcggagcatggacggggcatgggtcgcaatgattgcctgagagtcagcccctccaattgagctattgagggcgttcacgatgcgcccgaggtaatgaggagagaggctgttttctggctcctccactgcgatcagtgtgaatgacggtggcttcagtttgtcagcgtcgaaagaaacgtccttaccggttaggactgcacgcccgatggcgtgagaggacaacaccagtgataggtaaagcatcgacttctgtccatcgctgaggcgagagaagtcgactagattctcgtcgtgccctggggagaacgacactgacatgtgtcttagaagcgactcaatttcggatgtgacgaaagtgagcttgggatcggtgaaaaaggtgcctctgtgaagtcgcttccacatcccattcaggctttcactgaatgcacttaccgactggtttcctgataaacattcgctgatttcgtcagtgagtcctttaatccttgcgcggtcatcttcccaattgacggctcgtagcaagcgtccgagcagggcgttagctccataggttatgtggtcggcagggtctcgtctggcggggaggtaatgcatttgaatggtattgcgatgcgcccgagtgacgactgcggtcgatagtgggttggcgtttctatcaacatcaaggacataaactaggttctcttcaatgtctccatcaatcccgatggtcgcgctcaatcgatatctaacacgcgggatgccgtcggctgtatccaatcgcatatgagcgaaatgcggggccacggtcgagttgtcttcatcctccagaagctctgggaattcgaaatccgcttccagccataggctgcgctcctcaggtaccaaatcctcatcagcaggcacatggaagtcagatcgcttgatccgacgcaggcttggatcaaaggcaaacaacctgcagagcgcttgcaggactgctgtctttccagagccattggggccgataaggtaggtgacatcctcgaatgtgattaccgtaggttcattgccgaaggattgaaaattacatagccgaatactgtgcagcttcattgctcaccgcccatcgtccaggatgtgtacgtaccgcgtctgctgactcggttcgcgtcgccgacagccgaacgggtcggatatcgctgacttagaataggcggtttgatttaaaagatgttagtaggccagcattcagtaaagattatttggtgcggtcttgaaggctctgttgcagatcgcctagctattgatgaacggcatggcgtgcccattgtctagaaaggtgctctccgtaatccggtgacgacagggtaatcctgagcctacggagggagcgtatgcggggcattagcatcggtatgcattaggtaggtgggggaacagaataaatcaacgcaaggagccttagatggccggcagtagcttgttcgcactattggatgacattgccacactgctagacgacatctcactcatgagtaaagtcgctgcaaagaaatcagctagtgtcctgagcgacgaccttgctgtgaatgctgagcaggttaccggcatgaaagccgaccgagagctaccggtggtatgggctgtattcaagggctcgttgagaaacaaagccatccttgtgccttgtgctttggtgttgaacgcacttttgcctgcggcggttcactggctgctcatgattgggggggcatatctctgttatgagggctttgaggctatcaaggacaagctcacggctggtcgagacgatgacacagggcagccaaagaaaacgaagcctaagacgcctgaagagcttgcagcttatgaaaagcggaagattgcaggggctgttcgaacggacttcattctgagcgccgagatcatcgtcatcacactaaatatcgttactgatgccccgatgctccaacagattttgacgttagcgctgatcgcggtagtcatgacagtgggcgtttacggattggtcgcggggatcgtccgcttggatgatgctggccttattctccagaagtctaaagctaccggtacatggggttctgtggtgcggactgtcgggcgatggctgctgtcggctgctccgaagcttatgaaagcattatcctggatcggaactgtggcaatgttcctggtcgggggggcgttcattacagaaggcatcgggccgatgcagcactttgctgagagactggtcgaaggggcaggggcgtgggaaaccttcgcaactttaggcattcactgcctggtaggcgcgcttgtaggcatggttgccgtacttgtggtcaaaagcatcacatccatcactggaagtaaggcttaaagctagctctcatcgacgatgttgaatctggaatcgcatacaatcttacttcgtaaggaatcgctgggttcagcgccgttgatcccataacagcgtttggcataaggtgagtcgaactggcgttttaagcctgaaaagtagggcagtgggccgagagaggagcattggctaatgctaatgtcctgcttctctagccctcatatcatccgttatgaccttgatcatcttgaaatactctgctctaccttggattgcttctggagtagattcaatttctagatttgccatatggacagcaggatctatgacgtaatggctcgcctgcatatagttcttgatggctgggataatccagcatgcgggatagaaacggagaattccattaccagccttctgaatcataccgacccaggcaacctggttggatttaggcattaggttagaaaccatcccaccactcattccattcatttctgagtgtgtgatctgactaagaaaacgcaggatgggggctgatccttcgaactcacaaacaccgtgaaagatatgcttattgatcactgtcgagcagttgtagtcatcgccatacggatactcaatcgggttttcatctattgggtagccagaggctaccaataacatgccgtcatacaaatcgcttacagctacggctatacggccattcgtgccatctaggtcgatgaatttatcgggaaaacggaatagcgaggatgaaagctcgatcagcacgatgtcttgcatgtcgatacagggactatctgccgttatcagctcaccgatacgccagccgcgcattgggaatcccataccctctattccttcccagcctctcttagcaaagaggtgagtgaagaacggcgactcattttgtgccgcctcgtagttcgcatctagaacgtgttgagccgtcaggagaaaaaatttctgctggtacttgatcagtattcctgtcccgcctttgctatagaccatatcggcgtgataccggccaagctcttcaataggctgagagcaatgggtgaatataagccttctcacagactgaattacgttgctctgagacgtattctcgtagaaccgatttagctttcgtactggaattttaatgttttaacttcctgtatcgcagggtagaaatttgttgcggttacggagcttgaagcttcgtctgcatgtcagcgacatcgccctattttctagccaaaccgctcctgagtatcacagccaaaacaactgccagccaacggttagccaactttccaaggtagatccaccggcaggtcaatttgcaagctgctagccgctacgtccagatctgcggtggtctccgcaaccatctgaacctgaaactcggcatctgcatatcgctccataagtggcgcacgcatcagtaatactcgaacgcgagccttgaggcgctgcccctctggatgcccacaagcgatcaacctgcctatgcgtcccatcactcgacgcgcctccttttcatcatcagcggacagctgacctgaattaccttcgaagcgatcctctagctgtttcacggcggcgcggattgccatccgatgttttttgggaagcgccggtatcggcccgttcaccactaatccggtcacggtgacggcgtcagctttatcgctagtgatcaatgcttgcccgcgcttacgaacatgcagcttgctccgcttctgcaggcagcctttttgtccgagcatccatgtgacagaggcaataacttgggtggtggtagcttgatcaatacgagttttgctagatacagtaatgtcatctgcgaagcgcgaatacgccagtccctgagctttaaagcgagtgacgagcgccggctcgatatcccaaaacactaggttggccaagtaactacttgtactcgccccttgtggaacctggccctcacgagtaactagatccgcaagcagagtggctacatctgcggagaagcggaagagacccacgaacaagcgatgaatgtgctcgtttgtaattgaggggaagaaatcagcgatgtcctgaagaatgactgtcttggcgccggtatgaacccgagcgttcgagtaaatgctgcggggtagcttgggatctctgataccgccgtgcaggtatccagggaacgcaaccttgctgaggatccgatccacgatcttgcgctggatagtcttcagaggctcatgagcatcataggtatgtctgggtgttatgccgtctttttttgtttgcgggacatatcgataaaggcgagagctgcgatgagcaagtgcgattagcctctcgactggctctccgagagcacgtgctaaggcgctgatgctgtggatagggctatgaggatagaacggagcatccatgtccaagcttccggtgatgggccggccccgaagaaccggcccctctgaattcgaatgatgtggtttgttgtgtcatgggaggttctcaataaatggaatcaccactgtctcgacaaaatcccagccctcaacagccttctcccataaccagatgcatagacgaatacgtgcgatccacttgagcagggttactgccttcgcctttacccacgcaatccgacccgctttaggttcttgagatggagctgtctcgatgacacgagcatcttcactgttgtgcatagactgacgcgccttgcggcgcgctaggttctttaaattaaccatgactgatgttcccaacgacaggcgaaattgccccgccgccaagcattccgggccgaaaggaacgctgaagatgccactacaaaccacagttctgcttatcaagtcccttgataagccgtccgccgcattaccgccacatcacatttcgcctcaacgcatcaaacgatcagagacaaacccttggatcacctttgggattgccctaggcgctaagcactcaggagcgatgggcagcaccaacctgcacggcgaagaaagccaaggcgaacaccaaggcgaccagtttcccggtcaaaaaccgcgagcccaaatttcagtcatatttaaagagcacttgggtggtagcacccaacagacgcagtatttatcagaataaacaaaccggcgacaactgttatttgttgcaagagttgtttttcgtataagtcgtatttttgactatataaagcgtcaaaatttaagtgtcactcgtattagtgccacctaggaaatttatcatctttcaagttgtcgagttgggctcgttgacctattatcccactaggcggtgatggtcgcctggcgcctgtttcgcgaagcaatagcccatctgtgacaccatccagcattacatcggcatgtccctaaccagacgctgcccggtgaacaggcaatcggtcacctaagcgtcgtagatttaggagctattgccatgtctgatttttccccgctaaacatcttcaaatctcaagctaaacagcttgctcgtgatcagggcctgaagctttctgtcgctcaagaaacccttgtgcaaaaagcaggcttcgctgattaccatgagttttcagtagtcgcccagcggaaccccagagatccgcgtctgatggtggctgtgtttgggatcaaagactttccccaagcgatccatgaggacgatgtctacgcagatctggagcaggaacttgaggagcagctctctgatgcgattgcagagaccaacgcaagcggattcaccatagacgccttgacgatcaataccgctgactacaccgattcaaccgggatgctgagcttgggagtctcgctgacctaccagggccagcaagaccaggaacgggtgtatcacggtgcagcgttctttcttactgccacggtcgagttgctgcgccgtgatagtaagtggcagcttgctgaggacggcgtgtccatcgcggacggtgagtctgatgctgaccgcgaccgtaggtctgagcaggagtattgggcaacggtggaagaagcccgaagtagcaaccgcatgtccatggcccaagcccttgcgattgaactggggataactgtcgacaacgccgagcttttggccggatcagagatcacaaccaacgaatctgacgacgggctcgtatacagttactggatcaatttcgaaccagaagctgaaggtgaactgagagcagacctgcttgcacgattcggttctctagagtacgagctacacgcaaatttcttcgatgatattgagcacgacttctgaggtgatcaggtgatggccagtttcaatgctggccattcaaaaagctttgcgacatatccaggctccacacgcgaggctacctcaaggcgttacaggttcattacagttcatcatgaaggctctagcgaaacggtactactgccgccggacgcagctctcacagcactgatcccttttccttctttccttctcagctttggcgatgatcttcgtagcctttgctgcggctttgtccaaagatggtagtttttcgatagcttccaagtaacctgggtcgcgctttctagccggatgagtatctggagtacctataaagtcgtgtctagcagctttataacgcttttgcatccaaacatatttttcaagaacaccagaatcagtattttttaacccagcctttatcaatccagacaaggttttcaaatattctgggtatgcgttgctgtccgcccctaccgtttcaaccacacttcgccatgaaaaataatcgaaaaaccaagaaactttaccatcgctatccttatcccgctttagaaatttctttattacttttagcacttcaaccttgggcttcttcaaggctgcgttaaatatttcaggatcaagaataacgcgaggggccttcgcaaccttcgactccaagaaataggctctattcatggctggccctacgacaactttgtcagtgtgcaggagctgaccataggtcaagccaccacgtattagatagcctcgatctgcgagaattaccactatcaaactgagtttatttacgatctcaaatagagcatcaggactatcgagcctgtatgaaattaccaggcagtctgaaaactgagttgcttgaaagtcaggagcatttccgatattagctgtttccgccgcatcactaagggcatcaaccaaatcatttaatgtttcaatgtctttttctgtggacttaaccttctcactaaatcccaagaagtcgagaaacaatgtcagccgtttttcatattcaaccgcgttacccatactctctcccccgaggaaaagttcgaaccatgtccatttttttggactcgcagtacactacgtggggcatccagatgtgtttttcaaccctgcggggtttctaaatagggcttctcggagggccatcctctatttgcaaaacaacctaaagcttgtccattttcgtcgggaagctctgctcatgagctccctctgcatcccccgaggccgaatcgaccggcatgagctagtttgtgattccccgcaccaccagccactcacggcgtcaagcacacccatgagctttagtctggtgatcggtggtgcagcggcaaaaggtcgccgtgatctccctctgtttgaagcccagcactagcacttcgtccttgctgtaccggaaaccctacctaaagatgcgctggacaccctcctgggcagccaaggtagaaactggcgcggccatgccttagaaagctggtggagagggagccacatagtaagcatggcataatgacactctcatacctcattaacagggagaagtttgtggacaaggatctatttaggcatatgtttgaaacccaaattaagaaagaatttggcgacaatgcctcattcgccacacgagaatatgttcatgatcgaaaatacaggaaacatcgtgtaagtgggagaataataggccacgggccggaaggcgtaagccagctgtacgaaatcgtacatactttgattacagatgaggagcggggtaggatttttcctggcgcatttgacttagggaacttccaagatattcctgcagagcgctgcaaatatgtagcgcttgaaagtgagatatataacgagaccaaaatcgaccccgaggaagttttaaaaaccataaaaaaacgcattgctgatttgctagataagaaatttagtaacttcttttcaaaaaacccatcgaaatcacttaaagtccttaagactctttatagattccagagagactatagattcttatttactctattggcgcccccccataaaaccggtaagccatcgtttgaaatacgagactcctatggaattgatgggtcgaacgaagaagtagaaatcatttcggatttgaagactcatctgagttttgagataccgcgcgagcgtctccgtgcgattacatctgcctacggccagatgcgaggtgtactggatgcaattgaggaaatgcttatccagcaagctgcttcccagtgcggcaacaacctcaaaaagttcgagctgatcgtacaatacatgtcggactgtattgagagcatcctcaaaattgaagatcgagagcctgtagaattaccgctggatgaacttctatttacttacttgattcagctcgagttctcacatcacgtagcagccagttcccacctctttgatgcggtcattgctaaccaaccgccttttgttgagtcatggagcactattggtcagctgatgagtaaccttggctttcaaggcatctctgcgcagcactttatacgcagtacggatgatctcatcaaggacttcacttcgggggcgtcatcattcatcaatttttatagcactatctttgatcgagagatcgatagtgctacctacagtaaagctctaccgctcttcgaaaaactattgaaagtgcacagttatagcgaagcttataaaaacattcgatttactatagctattggggcaatggcgcttgtgctaaccgagcttcatgaaagcactccatataaaccttattggtatggtcaaggtaacatcaccggtgggctagttgaatttctcaaaagcgttcgattcgagcacattaatctcgattcgccggaaggatcaacgcggtactggactgggcgcctggattacttcacttacgccatggtgggtcaggaaacaatcttcaaggcacgattgatcttcaataagactatcaacgagagcatcattcgtatccttgagaccctggatcttgatctattggatgaaaagctctcgcttttcgtgtcaactaacggaggcacagcgctgtagtgagcagaacccgcctgagttgcctcaggcgggttgctggttaaggattgtgacggtcgtagtagtcgagtagctcgaggcccgcacggagcactcgagacacatcgaccaccagacgccaaacagatcgaatgaagtctttcattctattcaccgttttcgcggcgctcaccctgcacaaccgtcgttgccatgtacaggatcgctgtcatccaaggacgacgcgtcgaacgcagtggccttcaggccgacgccggaattccttccggggcttccccaaacccacggggaaggcgaacggtgtgggccactcaaaatcctaccgtccaagcggtgaaccgcagatgcacatccctgtgcaattggacggtgaaatgtttcccccacagctttcaccggacaggccatgcgagatggcgtctgtctggatgcgattctgtagattcaccgcgaaggcctgtaggggactaaaataaatacatataaatcaattagttaacagaataagatgtccagtatgacgctagctgaaatccacttctgacggcactccaagaccatacacgcaggcgcctggggcacgcaacaaaactacggcccagtgtctggagatgatcaattcacagcgatagggcggcgggtgaacgcgatgccatccatctcttccgggagcgtcggaagctgccctttcatccatttagcgtagatgctggcgagcgttccatcggccttcttgcgttgcacgaatgcgttcaaccggtcgagcatggccgcgccttccttccgtacccgcgcaggacagcgcttacgactaccgggaatagatcttcaaggcagcccctcaacccgaccctgatgacgtcttaatgcgattccaaggcggtatcttcgtcaagccatgatcatgtggcccgcctgaaagactgggcatctcaggctacagcttgaccggcttcagggtaaattacacactcgtggcccccccccttgggctgtgatggaaaacatgcttcgactggttggcagctctctcgatatcacatcagccattaacgacttcaggctgtcctaccaccaggacttcgcaaatgtgcaggtggttgcccgtcgatatctcaatgcgcagctgggcagcgcaaatgcagtcctacttgcccaggcgctatatacagctttgcgcaactggggggcttgcaaacgcagaagcccaactcttcgtcccgtcccgcaaatcgaaagtgctctaaagggcaagcggcttcatgaccgcctactcaaactgagccagcatagccttgcggcattcagcctcaatcagcaggagcatcgtcttctggacagcaatgcgccaataaacgatgttggagccttcgacaaggaaattctagggatcctgaataggttggcggatgtgctgtttttcaacaacaccggcatcacttaccccatgaaggccctgctactcatcaccgggttgatgccggcactggatagccaggtaagaggcgggctaactcgagcggggaaagcgggcttcaccggacaacaactcctgccgaggaatgtacagcaaggcgcaggccgtcgaatctgcgagcttccgttttatctggggcactgctggagcctacaccgggaagtgttcgtgaaggggattctggagagcaaccacaaggggctgcaagacacaccaggccgggttttcgacatcctgctgttcatgcagaaccaagctacccggaaccaaatcctcgcctttaaggtggagcgggaatggccgtaacagccattctctcccctaccccaattaagactggagagtggggcagtcgttgtaacccttgtcatcaacgccgaagaatgtcatgcggtcagcctcattgagtggcgcatcagcaatgttcatgaccaccggcaccctagctcggcaattaaaggatgctcagcacgttgtggtcttcactggtgccggcgcatcagcggagagcggaattccaaccttcagagacgcactgacgggactacgggagcgcttcgatcctgcccaactagccacccgcgaagctttcacaaacgacccgagtctctgttggcgatggtacgagtggcgacggagcaaggttaatcaggcgcgtccaaatggtgcgcatgtggcaattgccgagctcgccaggcatgtgccaaagctgaccgtggtgacacagaatgttgatgaccttcatgagcgcgcaggcagccaagatgtgattcatttgcacggaagtctgcactctcctcgctgtatcgactgtgggctcgcatatcaattgtctacaagccctcaagcgctgcctgaggaaggaagtgaatcgagccacctcagtgctgtgcctgagacgggtatgttcgtcctggagtggtttggttcggtgaaatgctactcgaggggcatggcaggcagggctggaagctgcaggtgagtgcgaagccttttcaacgattggtgcgtctgggattgtttacccgggtgctgagctcctcatacgcgctttgggccacggggtaactgtcgttcacatcaatcctatgcgcttcgatatcagcagccacgagcactttctctaaagccctgcttcagtaatgaagcagaggcctacgtcgcgagacctttgacagacctactcgtgatttctaaggctgtaagagggccagctcacatcattagcctgggtcaaaatcgcacccgcgccggcagctgccagaaactgagctgctcagcctctctacaaagatgctgagcagctagtgtaacgctatctattgatggtcagattatatgtttagggtcgaaggttcggttgcctgggatcaataatttacggtcactggcgattggtggcgcggtttcgatttcgagtgcccatttggggattgcgagctcttctgaaattcgctctcgaatacgattgatatagaaagttcgtgtatgaagtaaatgtgtccacagaccgtccccttgtggttcgggtatatcctccattagttcaataccatcaagtgtaacggaatttagttcgctgatttcctcaccatcttctccttcggcgcgctcgacaggggtcgatattataactacatgtttacgcgcagtttcgccaggcaaaaatttcagcctgccgacatgcggttctagctttgatagaatgaagacgactacatcagaatactcttgcttcgtcaccaatgataatggtttctccgcataaccaaacttcagcgtctcgcggaattggccgtgcgcatcaaaatatatctcgaacagcatccccgccagcatgtgctttgcggtttcctcaggaaaatgagcaagcctagactcaaggtttcccatgaattccatggccttctgagagttgccacatgctgcttgataaatgtttctccctaatacaaaccatgatgaaggtggaaactcctcgtcgcgaatggaagagattttcagcatggccggattttgggtgtaccagttatgagattttaattcatctattatctcatttatagttgatggtgcatcaacctgatacaaagcgtctgcgagggcttcttggctgtattgaagtcgtagttctacttcttccattgctggtgcctcaacggcaacgatctcattccctgcatcagcctcaggaatatgaacttcctcctcaggagccgcagttgcgtcattctctacctcagcgattacggtggtatctactagcaactcctgcgtattcacctggattgcagccgccagttgagagaactcagtaccgttgcttcgtgatagaccctcgattagtgtggctaaggtgcagatggtgatatcaggatgtcctgtttttcgcttaaattcggagaccagccgaggatcgattattttaatttccggagctgagttccctactgactttcttacatctctgacaatctgatatctcatcttaggcgcatagacccagtcagatttctcatcgttggttacaaagagcactttggggaactgagccgaagcagcattagatttttcgagtatctcgtaccaaatgatgaggtcaccataagggttttcgtctttgttaccatccttaaagcctgggggcattcggtgttcgaagcgggcagccccctcatgagcggctctggtgcaaagtgaggagaggtcagaatcaaggatgcaagtggataagtggtcttgtatttgctggtggatagttccagcgtcgaattggtgtttaaatacacctagatgtttttctagctcttcgatagctgctcgaaatccatttatataagctaagcgatccccctggaatgacgttctatgtaaaatattgtcatctacaaacagtgcggctgtttgatgaaggttttctaaggcttttttaatttgggtaggttctttacttttgggagtgtacgactcaaggttttttccggtaactcgcgaaagatattcacttgccgcccaggcaggtatcgcgagacgctcattcaaaacggcagcatctgaccaagcaaaaaactcttgccgggctgcttcatgtagtttgtaaaggtaagctaatatgttagtgtcgaggataattaatgtctgcgcagaaagagcgagatccgcaatctcacgaatatgctcatccattgtcttgtcaatttggtgataaccgaacacaggtcatgctccttgaaaactttatagaaaaatttctatatgggccaatcagctgaatcagagctcctcatcttcaccgcgaatccagtggtgatcaggaacgatcattgttccgataaggccatccgtttgctttctcaggatttcctcgtgctgagaaattgccagtgcgagcatctggattgcagatctcgcgacccgaagggcacgcaaggccccatcgataaaatctgagcggttgagatgctcgatttcaggagcctgcctcgcttgcgagggatccccaaggtcatgaagcactacgaatcggtgcgtacccgaattccgcagatccttctgtgagcggagaattccatctatgccgtcatagtcttctgccagctcggccaggccgtacattgcgtatacgcctgcacgaatcagtacctctactttttttgtgagcggagtacctgttttcttgtctgcggaatctctccacaacctcccgaaactgactttgttgggagctaatcccagcttgaaatagtagtttgccgttacggctaccttgtcgagcaggtcaagggctgttcgatgcgccagtatgagtgccgaggtatcagggccgtacattgcatagtcgagagtgtctgcaaactgtcctgtcttcggccagacgctttcatcacttgcacgccatgtcaaatcccgtgctaggacaaaatcgctcttcagcatattgaacatggcaaacaatggcggcggtctgctgcccacttctggttcactctcgagaatacctggaagggtaagccaatcgagcttacccaaggatgcttccacgagttcgacagcaggagcaagtgtaagacgttcctcttctacccacctgatgaatggattcgtgtgctcaggccgagatggcggatcgcttagctcactggcgagtgcttcaaccttggccgctgcgcttgcccccgcgtactggacaattcgctccttatttctaagtgcctgcctggctagcatcacggcttccatgcgcgttagctctgagcagcccccacgcttaaaaagccacatgagatccgatgccgcgcagaacgcagctacaccgttctttggatcaaccttcagagcggcaagccgtgcgtcatgagcttcagaaagccggtaggtttttgcgaacaaattagcgatattcgtccaggcctgagtgcgtaattccacatcggcacctacgtcttgcaaaaccctccaatagcatcgtcgagcttcggctctgtaggcgcgggtttgctcctggtgatctacccattcagactcatcggccccacaatttgcggcttccacgagcccgtttgctaggttgtaggtgatattagccgtcggatataggccatgaagctcgcgatatagctcaagaccctcctcaatggcatcctggcgtccaagtgaggcgccggcattaaccagagtggctgcacgcagggccatcagattaatgcgatttggcccatctagatcgatttcacgagcttgttgtactgcaagtgtgggtgcagcatccaccaaggcattgaggtgtgaggagagctttgagaatacgctcaacatgtctggtacctcctttcaaagtgaacgattcagcgatgcaggcatgtctcactcatccgcaaatgcttccagggcggcgagcagcttggctagttcagtaaggttggccgcagtgacgatgtcatattctcctcgactactcagccgatatacttctcgagcctttttgacccgttccagtagaggaacaacaatgcctgatgctctttcaagaaattcgttaatgtctgcccgtgtttgagggatcttgtagcctttggccgcacttgtgatgatgacgtccgcatcccgaagcttggcaatgccactggatcggattctctggccgttaacctctcccaatccgctgtcttttagatgggccatgatctccgtagtcagcacgtaatccttggtgacgaattcgctttgaaatcttaagaaccgcagaatactcaattgcaggcgctcatcctcatcaggatgctcaccaacccgctcgctgaaacggtctgcctggcggagagcttcctggtgtacctggtagtctgcatacccagactcatttgtcggcggcggcagaagagactggtacttggatggccattcaagcattccaagagtcaggctgcggaggattttcttataggcaagaactgctgcttccgaagctttctcttcgtatatctgagcgactgagccagcgaagaaatctgcaacctgaaccaaaacgttgtccttactggccatcgtctggaaggcatccttatcgccaaataggtcgttcacgaatcgttctgcaacgtagcttttgaggctctcctgaaattcctggccaccatgctcgtctacgatcatctggaggtcagggtatgcacggaacaaacgttcatagagcaacccgttcacgtattttatgaacgaggtcttgatacggaggccgccgtctttgtgaattcgggacttatcaacgacggtgaaatagagcttgaatggcagcacagctagctcgttgaggattcgggcacggcgatctgaatctttgggcttcagattgctagatttgatctcgcctgtttgaaaatgacgcgtgcggagtgcttcagcttgggcataagcagcttccagatctttctctgccaccagaatggagcacacgatgaagaagcccgagcttcctccctttgaagtatcaaggtcggaattcccggactcatccacgaaggcataggttctgtccatgagcttgctccatcaacaacgtgctgagcgcagtgggtcgcccaatggcaaggtggcgaactcagttcgtcgcagtggtagtgcctggagcggggccttcgctgaacgtgtagttgatgacaacgtcattgcggatcaagacgtcgagcgttttctgagtgcccgtagtcgtcaccttcatagtgaccacgtagctttgagcatgggctgagccgttggtgtaggtgtagatccacttctcgtcagtctcgctgacggcgctcttggcgtagggctcgccgaatagcgactttagttctgcagtggtagttttacccttggtgatgctcgctacactggccgaaggaaagtctcggcctgccgtgtagtgcgaagtagcgcaaccgccaagtaccacgcacattcccagaatcgcgatgagctttttcatatccgtccttgatcgtagaaggttccaatttagctggcatcgaggctaaaagccatcaccaccttgatcacctgcgctcgcgcttgtcggcagctcatagcacactatcctgcgctggaactgcagcattgttcgccctcgagatcctctcggcataaggtgccttaatcggcacattaagcccttaatcaaggattaatgtgccattttgggatcactacgccagcattcattcggtgggaagcgcaaggcttgtgatgaagctaatcgccactaaaacgcacataccaaccaacagcgggattgaaccaaatttctctagagcaagtgctgctacagggcctgcagcctgggcgatcagcgtgggacgagccagcagccccatgcgtgttccgtagccatcagcgccgaatagagccaagggtaatgttccgcgagcaatggtcagaattccattacctgctccgtaaagcgccagggctacgaaggctagccacgggatggccggtaaaagtagggcaatacccacccctcacagcaggatggcgatacgagccgaccaggtagggtgcgggtttctttagccacgtcgactatccattcgcctagcatttttccctgataacgacggttttgttgggtgaagaaaacgaccatatagccttccatttctatctcctcagcgagtaccaatcatttggtaggacagaagcccggcagcggtcatcgctagcgaacctacgacgtgcaacgaaattgagccgagcgcccagagcagtctgccttcctgaatcaaggcaaccgtttcggctgaaaatgtagagaaggtggtaagtccaccacagaaacccgtgatgagtaggagacgccactctggacttagtgtcggagatgcggcaaagaaggcgatggccaagccgatgatgtaacccccaaccatgttcgcgaccacagtgcctggaggaatcgtaggaaacagagcattcagcttcatccccaaaagccaacgcaaccaggctccaagtgaagcgccaacggcaatgacaattaatgacttcagcacggagagtcctcctcatcagatctgagtggactaactggcaagcagctcgcgctgaaagaaaatggaaactcgaagggtaagatcatagcctgtcctaaaatggaggacagggagacgcacctacgcaccctgtccagggtcacgtaggcatcatcagcacgaaggcggtttaaggaggaatgccatctcctgtcctgatcctatagcatcagcgccaatggcatcaagagcagccgcatgcaagcgatccgaaggcccttttggctaagtaagatgtttgatcaatgatccaggtacaggccgaccctttgcacaactaggtcatttggcgcgtttacatggatttaaccgataccacttctacgtacttgtacttcttcctagcagccttcacagcctcctgctcagcaagcaaagagctcaacgtatctgcctcgtgaaccaactcgatcattttcccttcaaactcgtttccaacgcgaagcgtgacccgcagcctgggagtaaaagcttttgccgttttcttcttagctgctggagcgaccaccgatttcgcgagcacaacttcttccactggctcctctactgcaggagcagacatctgctcctcgggctgaggcgtaccgaataacgcacgacgcatttcttcttcagttaattcagagttcatagaacatctcaaagggggcggtaatcagctcgacgaattctactaggatggctgctccagcgtgtccactggaagcatgtatgaatcacccgttgctcgacctacattcctagatcgacctcgagcctggcccccttcaagctgggctgcagcttttcgacaggcatggcccgcaacaacttgtcgacaagatgctcggcgtgagcggagtagatcgcgattctgtccggctctggcggcctgtaaggtactaccgcaccgacagatacttgggcaattctcagtatattcagcacgtcattgccaatgtgaagactttccaggtactcgacggttgcgcgggctcgcggctctgcctttgtccatagttcgacaacaatgcggtgaaatcctatggggccaaggtgttgcagagcactcttccacagcaaaccttcttgggacattttcagcctggtgctggtcattcaaaagtcacggctgttcgggcttggttgttttcaaatacctacgaacagtcgcttcagaaagccccaacctttccgcgatctcagcaacagaaattccccactgcttcaatcgattggcctcaatggcatttctagccgcatcaggacgagctggccgcccaggacgtggctttccagttcgagcctgcgactcaatctcaaggtcgatccctgccttcctaattcttgcgagttgcttcgtaagacgtttctggccgtccttgaatgactcgtgattttgcatggaggtcgccatcagcaggagcgtagccggatcgaggtctaggatcccggcgagcctcaccaggacgtcgagtccaatactgacttctccgcgttctatacggctgaaatgagagcgcccaagattgttgatgtcctcttgggacagaccttggcctctacgaattccacgaaccacgacagccagtgcttctgccgcatccatcggtatttccccaaccaaatccgaggataaagccacacctagtagtgtcataacacgcccaatcaggttcgttatgattgccttggggcttatctagaggtttaatagctttaacccatgcgtcacggccacgaaaaagcagccctgtcgtggatcagccaagccatcgtgagcggcgggtagagagggttgaattgtcaatttgatgttaattacttaggggaggccttatggctagcgtcgtagaacccgactttatgaaggggccacgtacaccactggaaggcctgtcgagcagctctgatgcacgagcgctggcgaaccaacgttttcccgaaaagccttactgcttggttcgagactggacaatatttcgcattgaagtcacccgcgacgaactcttcaaatgccatgcagcgggccagctcccgatgatcctgtttgctcacaacgtggcagaggacagccaaggtcgtttcgaacgcggcgattgggttcgttcaagcatgtgcaccggtctccacgaaggtgttgcgttcgagaccagaaactctgtttacgtattgattggccctggtcatgaacagctcgcgagcctgaaagacgttttctccctcttctaacctgcgctctatatcggagccccttcaggccaaggacatacgatgtttagaacacacgacgccgacatgctgggcctaccgggcatgttcggtgagggtcagtaccaatggcatcaggtatccaaagtgcttcgtaatcactggtatcacgtaactgtccaggccatgtacgaggacagaatttcagaggcgattctgatgatcgacagcgaaccacggcttcagcaactgctgattgcccaagacgcggagacgatcatcacagaggtgcaagtagtcacacctgcccacatgaatggcacgggagtttggcgcatggagaaactgaccaaagtgacgcttggtgaagaccaacacgagtgtgttgtctgcctgctggaggtcgagacaggctccaaatatcacagctctcaccaacctggcttcaacactgatgtgctgagcaatcttcgtccgatctatcacgcgaacatgattcgtacagcctgagatttaccaagaatcccgcacgatatcagcgcagatgtttccgtgcggatttcctggtaacgccatacgggctgcgaaaggagcgcaattatgctgaacactctggatgtggattttcatggaaaacgacatacggatttcgatctcgcacgaatcctaaaagcaaaagcgcaaggcttcgaaaaaccgataacagcctatctctgcggagtatccataaaggctcgtgctggattaggcgtcgtgtttggtcacaaccgtaaagaccaatatggacgtttcggcgacggtcacctgatccggacttctgacgtgattaaggcggagcgcgagggccgattttgggtacttaccacagagaattcacgctacgtgatcgcgacgtttcagcacggtaatgggcgtgcgagtcttcgccagtttctgcgattgtcagacggccaacaccatctttccccgcacttactgcagtagtggcgcagccctcaacgccctcattctgcggtatgcctttttcaaagcaaggcatcgaaacctggtgtcttgttggaagcatggatgttcagccggcactgcagcgccataccgtaagctgtctccagatgcgtagccagcgagccacccatttcgatatgttgagataaaaccacctggtgatctgcatctgtaagaacattggtgaaaatgagccaggaatgcatgtgtggcgttgtctgggttatcgcttgagcaacactttctgagagagctctggccttgcgatcatcagtgatgaaggcttggcggattctgcttgcgaaggcgattgacgacagctcgccttttccgagtttttttcggctttcaagggctgcgatggcttggagatcgtcaatgctgcaggaatgggacgcgaatttgcccttggtctgctcttgcttgaggcgctctctcaactcgaggtctgcttcggtggcggctgtgcggggcttgaccaggcattcgtataggacgaatccagtcatgcagaactcacacttggcttcttgagctgccgcatacagtcggcgcgaagacaaaatgttccacaccgagcaggtgtcggccacattgatcttgtggaatttcgatggatcaatagccatgtattgtccttccatatagagaggcaagtgctgccagttcgccatagccgcagagaagagcttcggccagcctgccgaggctgatgatgccttggctatgtgcgtccaggcaaagcttcacgtaatggtcggacagaccgcgttcgagcagagcgacttttctcgcgcgttgctggagggtgaggctctcaggtagttcggggtctatcttggcttgtcgagtaacacggtaacctcggattcgtcgactggtatcaatgtcggctcgcttcgcggccttcaaggctatacccaaggcgtcacagctcactcgaaacttattagcccatccttgagcttcctcttcagaccaagtagttgggtcaggaagcaagctgagcgtttctggaggcatgaggtaacaggaggcgaacctattcgcccgcacctcctggatgtctttgtctcccgggatggttacgcttgctccttcttcactatcaaaaatgcagtgagccatctcgtgcgctgcactgaatcgctgtcggtaaacgtcctcggtgtagttaactaaaatgcatttgccggcgacggggtgcatcacaaagaggcctgagattttggagttgtctagctttcgccggaacacatgcacaccgactgagcgaaactcggagtagatgtctcggggcacctctcggtctgcatgacccatttgccggcgaaatgcctttgccgcgccctcggcatgagataggaagtagttaccccgtggggtgtaggcaaaggtactgacagcaccacggagttctcgggttaaaaattcttcggtttcgcagatgtacagaaactcttgaatggcagagcgatcttccttcgagaactcacggccatgcgcccggtagagcgtttcagtttgctcaaatggggcgacctgctcgtttgaaataaagaatttgaagtcgcatcgatagtagtcggcaaggatgagcacctcgtctccggtaggctccaacgcacctttctcgatactactcaggcgctcaacgttgattgctgtgaaagctgcgacttcgtcaacggttcgctcaagctgaatacggtagcgttgaagcttgtcgccaagggcctggagattcatgcgctgtttgacgtcctgttaggcaatgcaccgagacatcatagtcggttttcaaggcgctccacttctcgagtccacatctatatcgctttattggagcttgaatcgccggattgttagttggatcgctgagggtgcgagtcttccccatctcaccattcgttgaggtagcatcagcagcacaaactgcgcttaccagcccaaaccgcgctatgcaatttccaggaggaagtccatgtccgacgaatctagtcgtttgtctttgtttgaagaggactatcttctacgtgagcttgggcctgtggcccatgtaccgcaggtggcgcttactgagctggtcgcgaacgcttgggatgcaggcgcaagtctagttgaactgtttcttccatctgaactgggtggcaccttgactgtgatcgacgatggtcatggcatgacgcccaaacagtttagtcggcgttggatgacgcttcgctacaaccgactgaagcatcaaagctggaaagtggagtttcctaaagggaaggatggtaaagccagaaaagcttatggccgaaatggtgtcggtcgccacggacttctctgtttcgcggatgagtaccgtgtagaaacatggcgagatgggatactcagcacatttgtcgtgggtacggaatcagggccgagtccatttgtggttcgctctgaagagttcagtgagcgagagggtgaaggcactaggttgtcggttgtagtcaatcgcaaaatgcccgaccttgaagaaatcatcaccgttcttgcagcacgcttcatccacgatcctggatttcagatccgagttaatggaacccccctgacgttagcaaagcttgagcagcacgccaggtcgcacacgctgaccctcagtgaggggcggacggcgaaggtgatcgttattgattctactcagcagaatcactcatcgattcatcaaggcgttgcgttttgggtagatcatcgacttgtcggtgatccaacatgggctatcggtcaggtagcaaatttcgatggccgaactcgattcgccaaacggtacaagatcatcgtcgacactttgggtttcgaggatcacgtacttgcggactggacaggatttcgtacaacgccagcagtaaaagagttgtatcaggctacagccgaccacatcagtcaggttgctgatgagttagcagcagaagttgtcgagtccacttcagaagacgctcttgtccagaatcgtgctgaactcaagtcgttgggccagggggcgcagctcgaagtcactgaatttaccaaagctgttgctcaggcgcatccgatggtatctccggagtttttggcgacagcagtcaaagcggtgatcaatctggaaaagtccaagagtggggctgcgctccttcataaactcgccaacctagatacaaaggatgttgagggactcgatacgttgttggctgattggtctgtcaaagacgcacttcgcgtgttggatgagatagatgacagactgagcgtcatagaggccattgctaggctggcagaggatccgaacacagatgagctccacaccctccacccactgatcttgcgatcccgctggcttttcggcccggagttcgaatcagtggaatactgttcgaacaccacattgcgaagcgtagccaaacagctatggggcgacggggacgcatcgtttcagaacgagaaaaaacgcccagacgttgttgtcttgcctgatcgcagcatggtgcagctggtgggtatagagcgatttgatccgcaagacccgaccatcgcgcagatgcagaacatccttctgatcgagctgaagagagggggattcaaaatcaagcgggacgaggtcaatcaggccgacggttatgtgcaggatattgctaattctggatatgtaaatggcgcgccctttgtcacggcctgggtggtcggacagtcaattgcatcgggagtgggtaccgagaaaactgtaggtgatgactcgcgcaaatatggtcaagtcagagcaacgacttatggggcacttgtgggcacggctaacctgcgactgatgcgcttgcgtaagacgctggaggaacgatatgacaacctgccaaccgacacgttgctcgctaaggtgttatcgatccaagaacaggcaacgctcgatttaaatacgtcaaacccagtgcaacatcaggatgagagtgctgcgctggcagtcgctcagtgaagcatcgtatcaatctatgggttgattacaggtattagcgccgtcgcaattccggcctgtcgtcagcatcatagatttttccgcctgtgctgaagcaatcagcaaggctagttttgccaaaacctaatgaaagataccttcaagccggtgtcaaatactcaaggactctttgtgccttcaactctagtagacattatcatccgcgaccgaggcgcgcaggcttataccgattacgcggagtttcaaattaccgatcctgatgtgatcgttagtgccgctaggcaaacgctcgaatcgatccctccatcatttggttcttgcgtcatggtcagtgctggcttcactgcaattctcaaatctcaagggatacccgcagttgtcgtcctgggagacctgctgattaacggccagtatgctttcgaatgcagggggaacattccaggggcaacctacgagggagagtttgtggacgccaagtgggacggtcacgcttgggtaatgctcgcaggtgtcctctgcgacctgtcgatcttccgaagcgcctacgccactaaaacgccaagcaacctcaaaaccttcatcagccagcagttcggtgagggtaagggagcactgatgtgtcctcacgatagcttgccggtcggcatggagtttgtgcccaaatttgcgctcaatgacgatcagattctggggattctggacggtttgtccaggcaagcacttgagactaagtgacgaaattcgaggcggcattcccggctgtgtcgggagctgaatacggctagaaaataagggcggcgctgacatcagtgcgagattagccaggcttccattttttgcagtctgcccatttcgagaagcttcggttttcctaaatctaaaagcatgagtagctcttgcctgcactctggtgatggaaaccattcagcgacctcgacattgcagtgcctggactcactcagggcccatttcacaaccatgtccgctgctgctcggtagtgatccgccatgaagagtcgtcgcccctctgcaaaccaaccaagcttggctagttgttcagtgacgtcaatgacgcccgcgtgatcaaaaaaaccggtggtgtctggatagtgaatacctgccagagacaccttcgccgcccccgcttctcggtcgaagtaggacagaaaatgccacccacctgtagtgcttccagcgtgcggaaagttgatcgcggccttgccagtgatgtagtgcgtgcgggaaacgcgtttcagatcaaagtcaaatagcggctggttcatgggagcttgctgagacgcgccaagccttgttttatgtggcccgcgttttcgccaattgtgtagagcgcgccacgaacgttggcgccgacttcggcatgtccctgggcttccacctggagggtcagttccatgagcgcagcttcgagagcgagttggttttggtacatcctttccaaaacatctgacagcgagtattcaccgggcatctacatggactcctttattacgacgcagcatagctcagagatgagtcagcaagtgtcttacgggtagctcccggtgctcagcaactttgaactaatcatgacgaccacgcccctaaccctgtgcagatagccgctagctcaggtcaaccctgagcatcctatttacatacaaaggtttggtgaatcatgaagagcgaacaggtagaaggcgttgtagaaaaggttgccggcaaagcgcagagcgcagtcgggaaactgtttggtgattcgaagcttgaagccgaaggtgcgggacgctaggctgccggtcagttgacccaaacctatggcaatgcactggacagtgtgtctacgttcgtcaaagagaagccggttgctgcgcttgcaattggtgcagtagccctgctggtactagaccgtctcctgcgccgctgaaggtgggaggaaaagccttgagttgcttctcccgaaatcgtctctcgtactctccagggctatctctgaagggtgcgagggctatagggataccctggagagcactttatgagcgtcccgtccctcagtagtctcgaagtgtttgatttgcaagctggcacagcaatgagcccgaaggacagagatgccggctagacgcttggtcggtttttattgatccgccgtaccggatttatcagaggccgggcctccattgaagctaaaatcggtggtgccgttggtgatccattcgaccagcttttccttgtgtgtgtaagccaccactccacgtttttgagtcggatcgaatcttaagacgcgccatataccaaaatcggggccgaagtcgatgaacacgggtttggaaacccaccagcgagcaaaaagcttgctgcgggaatgccagctaaatgaagccagtccattctccgacacttttgacaaacccattctgaagttgtacctgtcgaactcagttcgcgtgccatcgatcacccagatcatattttgatagtagttttgcctcgcgatgacctcttcaggatgtattgtcgatctctgaaactcaataaccatccctgaaggcgttcggacatctgctatatgtcgctcccctgaggacgcttgcaacacaacttcctgccactcggttgggaacatattcttccaatcgcgatgccatgccgtttccgtttcccaccacggatcgcaattgtccaaacgtttatgagcccaatgccagacgacatggttcccgcatttagcgacggtctgggaaccacaaaaactgcaaacaccacgtgcttttggagtggcctctacacgagcgccttcaagcaatgagtatttcattttcttccttgatgctaaaaatgggggggcggcagctcttaacttcctagtcggcagtaccttgtaactcacaggacgaaagacaaatatctgagcacggaagtcgtcctagcagcctggcaggcctgcgtaaatgtctaaagaggcgggtggcggagggtgccccacttaaatcgccttcaggagacgctcaagcgtttgatgctcccatgtgctcagcatagcaatgggatctgtgccaaagcgatttcccgagtctaaagaccagcgccgtccgtcagggcttatgcactcttcgcagtagcccagctcatcgcggtcgttatgaatagatattcgccaaccttcgacattaactttgaagcgctccgcataaatttcttcccatcccctctcgcaggctctgaccataattaggcgcccaagagctacctccctcagcacttgcctgacctctcgcgctgagagtggagccccttcggcagcgccatctagctgcgacgaacgagctgccgctctggcctctttcaacaattgctcagcgtacatagccggatcatcatctggcagcgggtagcctgcagcagatagagcttcggcgcgctcttcaatgagcagacgctcgggatcgcgaaccgtttggtaggctctgcctggtacgcgtcgagttgtgtccattcccggctccccagaaggctgatgaataagagcgactaaattacttttagaacgataacagaacgcttcgaatagcgatgccgagctccgaatcatgagggtaggatgcattgcgatctatgcttcacataggctcagacaccaagcaagcggagcgcgcaggcgtgagggatgcgagcccgcaggggcgagacacgccttggcggggctcgattcacggcagcctgacgccgcaggcggcacgccatcaacgccaacaagagataactcaaatgcccgacgatgaactccgcgaactggaggccaagagacgaaaggctttgtggatgcttgcgaacctatctccaggcgattcgaaggcgttcgatcccttatccattcttgatgaccttgaacttcaagagcgaaaagactcccctcatgctgacaaggcacttgagctcaaccagcttcgggattgtgtcaccgtgcagtatcaccacgccggaattgacatcattttggagcagactatcccccagccctggagggagcgcttcaatcaggcgagtatcgggtcgaccaaattgttagatgggccttacgctgcggactggtataaattcctggcttgctgggaaacagagacgcaacacctagaggcacacagagctgcctgcagtaaccccaagctggattgatgcagacggagaatagacgtggaacgagacggcgatgacaccgtgtactgcgatatccagatgccagcagccgaaggcagagagcttttgcaactggtaaacaccttactagattcgaaagcctacccgagcttggacaaagttttcgagcacatgcagtacgagctcagcacatcgattgatatcctggataatccgcaaaagttgggccgatggcgcccgacacaacactgactgtaggtgctggcagcatgtcgtccagaacaccgccatcaagcgtggagctgagttcgtaacgaactgcaggtatgttcctcggattgatggaaagcgaagtaatcagtgaaaatttcgatgctgtgccatttgattttttgcaaatgaattagccaaacagtggcatactgcctttatttaaacgaaaggaatcgtagatgaacactcagctaacgcagtctcaggcagatcagattgacttagcactccataagaatatctacccgaggttgggaggaggagagcttacccaactggcgaagctgtttggttctaacggacttttaaggacgctgcgtacggttcttcgtccgccaccgccacctcaaccgttaaggggaaatccacccaatgtgtccgtaacagttcaattggcatggatcgacaaaagaccatatgcactaatggatcgtgaaaagcataaagttgaaattgctgatgttgctgttttttattttgatacaaaccggtggagcacgggaagtagcacgacagctcggtgcctgcttttacaggccaaagcagttaagactgcggctcaactatcggcacccacagtttgcttaaaccctcccgcccctaaatcaaatacaaccactgaacgagagcttcgacttttgtcgaagtggcctaagtttgatatgtatttgggctccaacagcaacattccccttgctactaacatacaggttcccttctcaaccagtcctccgccgatggggtggtttatgggaactccgatgatcagaccttccagttcacaagttggcacctgggttagcccatggatgtgtgctcctgcggagcagaatcacgcgtgtaatgaaacattgggaagtttactgtgtaggcatttttctggaggccagtcatcgaacataagcaagaggcccatagatgcgggcgctcccttcaactacgctcccgcctcccttaatcacggaaaccccacgtctaccaattgggatcggctgtgcatcgagatgatcagagccgtaagaggccagataatcccacctcatttgacaaacggtgcgccccaaaaccggttgcagcgggctgtgatgtactcgttcccagtgtggcctgcgcttaaagtgcttgctgcaaccgcactaaatatattgatgcggtttagcaaaaaacgcatgccgattttgattgtttcgcgagtatttgacgagacaccttagtcgtagtcgatttagttcgctggaggtgtccatgcgatctgggctagctgctaccttgtgaccgagatttacaggattcagttggctcagccgagtcatatcaggctgagcgactgataagaaaagctcgttcccgagatgctccttccccacgatcacgaccgcctgcatcggtttgacgagagcttgagcagcactgattcaccatctgcaatgcctcgggcagcgcggatatcggtacgtatgtctatcggctcgaagaccggttagatcacattgacgggaatcagtgagtgatagccctaataaattgtgcacaaatctcaaaatctgagcttggacgtttcccgtgagtgcttgcccgcccaacgctttgagctatcaacgctccatgccccaggcatccatcgcctcagtgacagtcgcataccagtggagctcaccaacctgtaaggcattcgcgatttgcctgttggtattgccgtcgccccaagtcgggagactctccatggctcctgtgaaaagactggctgtagcgacagcgaatcgccccgtacttgtagactggaggcacacgtagcgcaatgcagcgccactggaaagcctacgccaggccacgacctcaatgcagtccattggctccacaggagcctcgacggcgaaacccgcgccctcatccgccctatggctctcagatgctcggaacggcccgccaagcgctcttgggacgtgtacgaggtgcttcaactgctcacgtgcggaggcaatttgctcccggaactcttctggatcaatggacatggccccttccggcgtcaccctaagggtctggaggctgttcgcggcttggatgaacgcaagttcgcgctcaatctcacgctgaggacggcggtcttggcggatgagatcccatagcgcacggactattcgcatctgactattctccctggtatcggtaaacccacaccggcagcgcgtgaaactgtgatgactcaggttcacaagccgttccggtggagcagcaacactactcagcactctcgcggctgcttagccgcatttccagcttttcaaccagagctttgacgcttcggatctcaaccgacatatcaattttttgcagcttggatctatgctccagagcagtgagcgtgtctttaacagagtccagttcgtcttgggtctcaagcatcgaactgtaggtagaactcgaggtgagcgccttatattcagcgtgaaaataatgatggagagaagcagggtcagagtggccggtgagttgggccacctctgcgcaaacatcgtctcgcagcgccggcgtccaccctttctttagagcgggggtttgggcgaatctttcctccagcctgatattgatttgacgcgtgacaaaacgatgtctaaacatggacaggcaaacacgggtacctgacaaaccagcacctaaacacagtcggtcaaactccttagtgattgactcttttttcagtcgactaccgttttcacctaggaatatattgttgggctggtcgaaaaaaatattacgatctgctaggaagtcaatgtaagcgttcctggcttcaacgtaaattgcaaaccgccttgcatctgcagcattgattttaaaacggcgtaacggtgccggagttccgcgctttttagtggggatcacaatctctagtgtattcgaaatgttttgattgagctgaaggtcgaggtcaaatagctcctcaggacgtagtcctgtgagtttcatcattcttaacgtgaacatccgccgctcgtatagatacacactggtagcatcgtagagtttgaggtcactgattgatttaagcttggagctagcaggcagatcctcccagtctcgcttccggaaaatctcatcctggattttttggatgatgtgttcgtctattgccaccttgtcatcgttgtacggcacgggagctacgagcaggggatgaaccatgtaggatcgcttggttttgggatttatctcataagatatcgtgatatttgcaccactattctttaggcctaccaacggcgttttagaaagatctggatagttttctgttagccagtgcaaaaagttaagcgtggtgtgctggattagcctggtgcgattgttattccttgctggtgcgataccacgaagggtagacctggtttcttgaactagctgttcagtaaaatccttaaaattagtttcgttgaaattgctgaattgaatgctcttgacagagcaaaagcgaatgaagtgcgtgatgagcgctgcgtctaccctcgcagaatctctggcgcctgtggacgcgcagatctcagcgatccatagattggcaaggttgcacggcctaccgttaggccagcgaataagtacgaagttttcgatagtgcgtggctttccaatgaacgcctcagccttccgaatcggcatagctttgtctggcaggcttacggattcatattccgtgtagagttgcttacccatcctttttgccgccgtcgattaccttcattttctctgaagaaaatatctggtcgcttatcaggaaagattgatatttggccttggatgttttgactttaagtctgatggttgcgcggatttcgtcagcgctacggttgctctgagggtcaatacgctctaggaaagtcaggatgtcaaagtacgccatcgaggcgatgtgagcctccagcagcgcgatgcgtgcctgatccttgtctgaaggaaggttaggtgcaggcgccgggttaaccttgggagtcaacagggcaaatgccctggatctcatctgtagcatgttgtcccaaaggcttgacccagagatgccaaactgtgcgaccttagccgcttgcttcagggagttgagcgaaatcgatgtgaagcagccagcgacatccagtttgcagaagcctcgcatcgaggatagggctcgaagctgggctttcgacggtgtaatttcttcagatagcacctgtgaaagccaagtgtgacgagagtgaagatttttatttgttgtatctctcatctttttggcctcctaggcaaatggcgaaatcgatggtgtagatttcttcgtcgtaagattcaagcctgaccttatatgtggtcatatcgaactcaggttgttgcaccattttgtctaggtatttgagcaattccttgttgctaatcgaggcgatgctggtggctttgaagtgcttcaaggcttctatgtaaagcgctagaagcccttggtttgtatctttggacagcaagccgttttcaagagcaatgagcttgtcgtcgatgcattcggattcatatcggacggcttccgaatctgacggttcataatctgtgtaatcatcaatatgcttcctattggagtgacctgccatatacctcagcaattctttccctgaatctcctacgtgtctatgtacgagcaggaggaagaattttctcatctcgtgaatgcgcacataccatcgccgacctattttatcgacgggcagttggatagcatcgcagaaagtattaatgcacaggtttactttccattcgggaatttcgccactagggcatttgaatcctctgcccggaatataaaacagcctccctgcgtactctgattcatctccatagatatctgctagcttttcgccgagcacttggagtagctggatggcatgggcagcaacgtagggaatagggcgctcaatgaagtcgtttgcacccaactccccagttttgccaaccatgtggcccataaaagcgccattgttgccccggtcagtagataggcagttacgttcaagggtactaagctcagtattccgaataggttttacgatgccgataattatggcgcaagcgccataaaaagattccatcaccattttgtagttggttttatctacagggaaatttttcttctctttggtttggagcctgcttatgttgagcgcttggaatagcggctgggcaggtaggttttccatacctctcgtcatccaaaggtgttttgttttctggaagagctcgttcttttttacggactgtttcgacaatgaattgtcttcgtcaatagagacgaattgctcgatgtaaaaaatcagagactcaactatggcatttccgtagacggttatccacttgcaggcctgattcaggcatttgaagccaatatcaagaggtagcaatttggtgtggccacctggcttcaagtgtggcttgtaatcaagaacaagttgatcaatgttcagcttaatgtcggggatgtcttcgggcagaatatcatggccttggaaaaataattttaggcacgacattgtatccataaaagagctgatgcccatcgccccgtcagctgcttcatctattgtcttagtattttgagtgctgtgaaggtttgctcgtacacctctttgtagtaagtcgtcatgggctaaggccggctcaaactgcctaatgaacagtcgaaaatttgcattatgcagagacgttgaaggtcgaccgagaatggagccaataaagtctcttgacagcaatcctttatcataggtgctgttttgggcgctggagacatagagatcgtttcgagtaaagtaggaaatcgcttctcttgtgagctcaactggcagggcgtccgggtctgatataagatcttctaatgagaaggagagaggtaaaatatcgagcaggtgtgaaatgaaacgctccttcaacaacaaagcagcagtccatccaccctgactgaaagtttcggcgatagctttgcaggcgtcctcatcgaagagcctgaagccatgcgtactggtttcataagtatctttataaagattggcgcgtgccgccaaattcatagcgaagctaaagtatgtgatccatcgaccttccgcgactggtttacctgtaatggtgcccatgcgacagtgaaataaccatttctgcaccgtttccagcagcagcttattaggggcgtcggtgaggttggtgccgtccgccatcaagcgatcaaagctcatgcactgaagctttgacccacctggaaaactgaccagccattcctgacttccgatcccacctcttaccagccaatctgcttgatagctgtggctccttttatagattttgctttgccgttccgcgtgctcgatcatcgctttgatacgacgttcgtcgaatgaaaagtcttccattagatggccttccaatcggaaagggagactagcggacgaaggtcttgcttcaggatggtcgcacgagcatgcgattttcggagttcactcatggagtcgcccgaaaccctgcccgcaatagccatctcagcgttagatgcgctatcgaaatcgagggaaattgttttcgctactaaatccctgagcaccgggaagatccataagggcacgctagttcgctcatcgatcactaagcgttcttctggtgcaagcttatcgacggcatctgcgtatgcgtagatcgcggcaaggctacccgcactccgatcaaatagcagctcgcgctctacaaacatttcaattagagagctggggtcaggcgagtaatgacccagcttcgagcgtaaggcttcgcttaagggatctcccttcttaaggcctaatagtatccgtcggacaaaagcctgtagctcttctcgagtgctaaagtcagatgcagctaactgccaaggctcgccctctgttgctactaagatgaccttttgatgtagcaccctgaaaaacctcgtcgcccatcgatgaaccatccaggccggaatatatttatctctgaccacctgcaaagagttacccagcatgtccgctacggcctggagactaccagtacgcaaaaactccaaaatcccttgagtgcatcggatcgtgtagagattgaccatgcttggagttacgcctactttgtctagttcatctttatataaatcgtgcagagagagtccggcatttgtagtcaaggtttttgcaaagttaggactggagccaatttggtttctgctcgagacaaggaacagcttcctccacccgctcttaccctccgataaaaggcgtcgtcttggcatgtttgtacaccgaatcacatccataacgatccgagtgctcaatgggggaagtacagagaccttgcgtgactgcgcgcgaggtttgctaacgctgactgttattcgcttgttgtcactattgccgcgtaggtagaattttccgtctcgtcggtataaccttatgttggtcagtgatgatggattgaacgaaggattttctgatgcaatgatcgcacttgcaactgcgcagtctctgggtgacaagtagccgagtagtcggttgaaagtttcgttaactgtattgttatcgatacagtcgtcgccggcagcctcccacagtcgtgccctaagttttggcttgctatgggagttgtagattacgggcctgaagaaaggtagttcttgcaggtcgtcgaatgtcatcgatttaagctcgtcagtctgttcggcgtaatatcgagcgacggctagaaaccagttaatacctgtaggcgaatctggatgcgcaagatgaatcccatttctgctgaattgtccgctctcaagcaccgcctcgatttcgtcattcgagatgttcttacatagctcatcacctcgggcgtggcatcttagcattcgattccagtagtctaccgagcattcgacaatggcatcggcccttgtctcgagagtgttcttaagattaagtaggtacacgtcatcttcaaaactcaagccttcttccacaaggtattttttgggaagtagaaatcgtggccctttgggaataggcgtgtgcacagtcccgtaaccagccggttgagacatattctccgggtgactgacggagttcgcttttgcatctgggatgaatgtgtcttccggtataaatccatcccgcctcagttttttgtaaacaaacgccaccgcgttccaatggtcatatcgggttttgggcttatgatctttgttgtagaggtgatgggagtagtgtgtaagtatgaagttgctccagtcatcttccgcaggtgggaactttaaccggagcttggcaacgtggttgaaaatatatctacttgcccggaagcgtcctgaatagctagtagtctctccagtgatgcataataccctaaccgcatcggctactttatagagcacttctttgtcgacccacgatggagtgtggatggtagaaatcctgtagccgcgaatacattcatcatcatcccgcttgaatatgatgcgatcatcctgcacttggtaggtaagcataatgagatcctacgttgaaagcggcatagcgtagtgatttggttgctctggtcaagaactttcgtgcgtgcttctaaagttttaaacagtgtattaaaagcatactcttacatgtatttcggggcgggattttgcattaatctcacgtcgcagtgaaaggttggccgacaattgatatgttgtttggtatatctgttggtctgtttttcgctgataaggaattgccggcgctggacgctgatcagcgaatacgccgggtggcaggattaggctggacaagagggttcgtcgttatcggcatacataagcgtgggtgagtgcaaggaaggcggttgctccttcccagtgtacttagttcctagggagtatttcactgagcgattgcttggtcatcctcaaccaggtggtctctaatagctctttgccgggattgctggcggggcattaattaaagcaatattgacttagcgtttgaaccaattatcgatttatctcgtcgccgtgttctacggaatacaagcactacctccgcatatatttagtccggttggtgttcggcccctagcttgtggtatcgagtctaatgttaggctccgaatcggcttgaatcacgtccagcgcaaccgtgatttttttcaggtgtgactggacatcccgcgcctcgccgcagacagcactgcgatatgcgcctgctgtccaccgttgagattggtgatatgtggggggaggcaaaggcgatggacggtgcgctagggcttcccacccgtcaatccgagatgatgggcaacctggccacgatgaactcatatcgatcattgtgagatctctcttccgttctcagcctatgggaggtggtggagtgtcgatgaattcagcgttttttccgtctggggtatccgaagcacatggaaatgggtgtcaagttttaggtgtcaaaatcgttttctaagctgttgattcgtatagggttacaccttctagatgaattcatgtgtctagaaaaggattttgctcgacatcaacgggattctcggcctggccgcgctgatgggcggcatcaagcatggtgaacagtcttacaacgacgattcggcacgcacctatagcgtgatgatcctcaccgccatgggtgtgtcgatggtggtgccggaatttatccccgaagccgactggaaaatttactcagccttcaccatcggcgcgatggtggtgttgtacaccctgttcctgcgcatgcaggtggggccgcacagttatttcttcagttacagctacccggaaaaacgccgcaagaaactgccggaagagcaggaggagccgccggtcaacctggcgttttccatcggcaccctggtgtttggggtgattgtgatcggcgcattggccgaggtgatgtccaagactttggacctgggcctggaaggtacaggcgcgccgccggtgatcacggcgatcgtggtcgcggctatttcggcggcaccggagattctgaccgcgttacgtgctgcgttggcgaaccgcatgcaatcggtggtgaatatcgcgctgggtgcttcgctgtcgacggtgatcctgacggtgccggtgatggaggcgatggcgctctacaccggccagccgttccagatggcaatgacgccggtgcaaacggtgatggtgtttatcacgctgattgtcagcgcgatcaacctcaacgatggcgaaaccaacgccatcgaagggatgacccattttgtgttgtttgcgacctttatcatgttgtcgctgttggggctctgaatcaccgagaaacagtgtgggagggggcttgccccctcccacatttttaatcggcgtctggtctaggttccggcgatcaactggcgcgccgcctgggtgtgatcggcgatcaggcccttgaggtccaggccttcgacctggccatcgatcacgcgccatttgccgctgatcatcacccgatccgcgcggtctgcaccgcatagcagcaacgccgaaatcggatcatggctgccggagaaacgcagctcatccagcttgaacagcgccaggtcagcctgcttgcctacggccaattcgccgatatccgtacgccccagcaactgcgccgaacccttggtcgcccaactcagcacgccctccggggtgattttttccgcaccataacgcagccgctggatatacagggcctgacgggcttcgaggatcatgttcgacgcatcgttggaggctgaaccgtccacacccaggccgataggcgcgcccgctgcgagcaggtcccgggtcgggcagatgccggaggccaggcgcatgttcgagcttgggcaatggcagatgccggtgccggcggcgcccaggcgcgcgatttcatccgggttgaagtgaatgccatgggctagccaggtgcgcggtccgagccagccgacgctgtccaggtagtccacggtgcgcaggccgaaacgttgcaggcagaagtcttcctcgtcgagggtttccgccaggtgagtgtgcaagcgtacatccaggcgattggccagttcagcgctggcttccatgatttccggggtgacggaaaacggcgagcagggcgccagggcgatctggatctgcgcgccgtcgccgcgctcgtggtatgcgcggatcaggcgctggctgtcttcgaggatgacctggccttgctgcacggtctgttgcggcggcaggccgccgtcggcttcacccaaactcatggaaccacgggtgagcatggcgcgcatgcccaactcgcggacgctttccacttgtacgtcgatggcgttttccaggccgtcggggaacaagtagtggtggtccgccgctgtggtgcatcccgagagcagcaattcggccagtgcgactttgctggcgagagcgagcttttccggggtgagccgtgcccagaccgggtacagggtcttcaaccagggaaacaagggttgattgaccaccggcgcccaggcgcgggtgagggtttgatagaaatgatggtgggtgttgatcagcccgggcaggaccacatgttcacgggcgtcgaacacctgcgcgcagggcagcgcgggttcttggccctgggccaggacttcggtgatcacaccgtcttgcagcaccaggccgccacgggcatcgaggccattggcggtgaaaatcgcgaggggtttttttaaccagatacgggtcgcaggcattggccggctcctctgaatgatgggttcaggtttgccagctcagtgttgccctgtctgctgatccagggtcgccggtgaaggcgagggggcagtctacgcgcggatcgttatcgacggcaatcggtcgataacaatcccgcaccgcttaccaggcgatggtgtcgcctttgtagtcgatgaagtgatggccgcctttgccggtgtaggcgttcacctggtcgaccaggccgcgcacgctggtgtcgacatcgatgtgcgcgttttcgccgcccatgtcagtcttcacccagcccggatgcagcgacaatacggtcagtttgtgatcacccaactgagtgatgaagctgttggtcatggagttgagtgccgccttgctggctttgtacagcgccaggtccgagccgtcggggatggccacgctgcccagcaccgaactcatgaacgccagcacgccagtgtccttgcggatctgcccgacgaaacgctgagccaggttgatcggcgctacggcattggtgaaaaacagttggccgacttcggccagggtggcgtggcccggctcctgattggcagggcccttgacgccggcgttgacgaacagcaggtcgaaggtgctggccttgaggcgttggctcagggcgatcacggcttgctgatcgtccatgtcgagcttctcgatctgtaccggcccaacggctttcagcgcatcggccttgctcgggtcacgcacggtggcggtcacgtcccagccgtcctgaagcagttgcttgaccaggccgaggcccaggccgcgggaggcgccgatgatcagtgcggtttttggcgtagacatgaaaagcttcctttagcgtcgcggttcacggagttcaacgttgtagcaggatacgcccacggctgaggtcggcgagttgaatttgcagggtgtcgatatgcgcttcgcccaaggccagttgcagctcgacgccgttggcggtgaaggtttcttcgaccaccagtccacccagctcagccacacgcaatttcaccaggttcagttcggcgaagccacaggcgcaactcaaggggacacggctgatcagttcgatgcggtcggccgtttgcaggcacttattcgcgccaccgccgtaggcccgggcgaggccgccggtgcccaactggatgccgccgtaccagcgaatcaccagcaccgccacctgatcaaaaccctgtgcctcgatggccgccaggatcggccgcccggcggtgccgccgggttcgccatcgtcgttgctgcggtattgatcggccagtttccaggcccagcaattgtgcgtggcgttcaagtcgctgtgttgctcgaaaaacgcctgggcgtcttgcgggctggtgatcggtgcggcgagggtgataaagcggcttttgcgtatttcttcgcgaaactcgcaaaggccggtgagcgtgaaaggcataagtcgcttcgtttaatgggcgggcttgatgccgcagcccttgaggatgatatggatcaggttggtgccggcgtcttccatgtcctgcttggtcagcttggtgcgaccggtgacgcggcagatctgggtggcgaagtcggcatagtgctgagtgctgccccacagcaggaagatcaggtgcactgggtctatcgggtccatcttgccggcgtcgatccaggcctggaacacggctgcccggccgctgaaccaggcgcggtagtcctggctgaaatattcggtgaggcattcgccgccactgatgatctccatggcgaagattcgcgaagcctgtggctggcgccgcgagaactccatcttggtgcggatgtagcgggtgagcgccgcggccgggtcatcctcggcggtcagcgtgttgaaagtgctgtcccacagttcgaggatattactgagcaccgcgatgtacaggcccagcttgttggtgaagtagtaatgcaagttggccttgggcagcccggcactggccgcaatggtgttcatgctggtgcctttgtagccatggcgcgcgaactcgtcttcagctgcctgcagaatcgcttgttcgttcttttgccgaatgcggctggcgggcttaccggcgtgggtgctgtgggcaggaacttcgaggctcatggaggtttccgtgctgatcgattgagacgacgtgtgcacagataacccaccctcaagcctcagacaagtcctgatgcaataaaaccgtcaaagcggttccaggctgtcgctttccggcgctttgtttgcggcagcgttgagggccttgctttccggcagcagcaagcacaatacgatggccgtcagcccgccgctggtgatggcggagtcaaacaggttttgtatgagcgtcggcatctgatgcagcaggttcggctgggcggcgatgcccaggccgacgccaaacgaagtggcgatgatcagcatgctgcgccggtccagcggcgcctgggcgaggatgcgtacgcccgcagcggcgacactgccgaacatcaccagcgtcgcgccgcccaataccggcttggggatttgctgcagtactgcgccaatcagtggaaacaaaccgagacaaaacagcaccacgccgatgtacaggccaacgtaacggctggccacgccagtgagttggatcacgccgttgttctgcgcgaaggtcgtgttggggaaggcgctgaaggtggcggcgatcatgcagctcacgccatcaccgagtacgccgcccttgagtcggcttatataagaagggccactgataggttggcgggcgatcatgcagttggcggtgaggtcgccgacggtttcaatgctgctgatcagataaatcagcgcgatcggcaggaaggcgctccagtcgaagttgaaaccaaagcggaacgggatcggcaggctgaccagcggcaggtcgggcaaggcttgaggcacgagcttgccgctgaaccacgcagccaggctgccgagcgcgaggccgataatgatggccgagaggcgcacccaggctgtgttcgaacggttgagtagaatgatcgtcagcaccacgaacagacccagcgcgaggttggtgggtgcgccgaagtcgggtgcgttgaagccgccgccaaggtcagtgataccgaccttgatcaagctgatgccgatcagggtgatgacaattccggtcaccaggggcgtgatcacccggcgcagttgcccgataaaccggctcaacacgatctgtaccacggcgccgaaaaagcacacgccgaagatcatcgccatgatgtcttccgggctgccgccgcgttgtttcaccagaaagcccgccgacaacactgcgcccagaaacgcgaagctggtgccttgcaggcagatcatcccggcaccgataccaaatggcctgcgcgcctgaatgaaggtgccgacaccggagaccatcaacgccatgctgatcaggtaaggcaaatgggcggtgaggcccagggtggagccgatgatcagcggtggagtgatgatgccgacaaatgcagcgagtacatgttgcagtgcggcgagaaaggccggcgcgggtttcgggcggtcgttgaggccgtagataagatcgctgctgttggacgcttctggtggcatggcgggcaaactcaaggtctatgtccctgggttgttgcaaaaaactgtccaactgctcagcttttagctgcgaggccgagttagcgggttgctgcgaggctttccaggaagctttccagcaccaaatgggggcgccggcctttgcgcgtgaccgatgcgaggcttaaatcgtaaaaacgcgtagccggtttcagcgcacgcagtcggccttgttgtacccacaggctcgcgtagtggtcgggcaggtagccgatgtagcggccggtgaggatcaggaacgccatgccttcgcggtcggaggcgctggccgtgcagttgagcgcctggtaatgggcctggatctcggcgggcaggcggaaggtcggagcgatggcgtcctgggcatcgatgcgtgcatcgtcgagttgcttgttgtcggcgtagaacaaggggtggccgactgcgcagtagagcagtgagcgttcgctgtacagcggctggtattccaaccctgacagggcgctggcctgggggactacgccgacatgcaggcgaccgtcgagtacgccttgttcgacttcgttgggggcgatcatacggatctggatctgcacgtccggcccgcgctccttcagctgcgcaagtgcgtgggtgatgcgcatgtggggcagggtgaccagattatcggtaaggccgatgatcagctcgccgcgcaagtgctggtgcaggccattgacctcggtgcgaaagctttccagggcacttagcagttgcagggccgactggtagacctcgcggccctcttcggtcagggaaaaaccggcgcggccgcgttggcacagtcttaatccgaggcgttgctccaggtcgctcatttgctggctgatcgccgagcgcccgatacccagcacggtttccgccgcagaaaagccgccgcactccaccacgctgcgaaagatgcgcagcaggcggatatcgaagtcgctgacttgggccaggggatcgggtcgacggctgctcatagtttagtgaaggcctgactgaaggttagaagagttgaatttcaccgactttatcgccgtggcaatttagctgcaacaacgcttttcaatcccgacgctgccttttgccctgcgaggttttgctgatgaacatgcccgaaaacgccccatcgtccctggccagccaattgaagttggacgcgcactggatgccgtacaccgccaaccgtaacttccagcgtgacccgcgcctgatcgtggccgccgaaggaagctggttgaccgatgacaaaggccgcaaggtgtatgactcgttgtcgggcctgtggacctgtggtgccgggcatacgcgcaaggagattcaggaagcagtcgccaaacaactggggactctggactactcgccgggcttccaatacggtcatccattgtccttccaattggcggaaaagatcaccgacctgaccccaggcaacctgaaccatgtgttcttcaccgactctggctccgagtgcgccgatacggcggtgaagatggtgcgtgcgtactggcgcctgaagggccaggccaccaagaccaagatgattggccgcgcccgtggctatcacggtgtgaacattgccggtaccagcctgggtggcgtcaacggcaaccgtaagctgtttggccagggcttgatggacgttgaccatttgccgcacaccttgctggcgagcaatgccttctcccgtggcatgccggagcagggcggtattgcgctggcagacgaactgctcaagctgatcgaattgcacgatgcgtcgaacatcgccgcagtatttgtcgagccaatggccggctccgcgggtgtgctggtgccgccacagggttacctcaagcgtctgcgtgagatctgtgatcagcacaatatcctgctggtgttcgatgaagtgatcaccggtttcggccgtaccggctcgatgttcggtgccgacagcttcggcgtgaccccggacctgatgtgcatcgccaagcaagtcaccaacggcgcgatcccgatgggcgcggtgattgccagcagcgagatctaccagacattcatgaatcaggcgacgccggagtacgcggtggaattcccccacggctacacctactcggcgcacccggtggcctgcgcggctggcctggcggcattggacctgttgcagaaggaaaacctggtgcagagcgtcgctgaggttgccccgcaatttgagaacgcgctgcatggcttgaagggcagcaagaacgtgatcgacatccgcaactacggcctggccggcgcgatccagattgccccgcgtgacggtgatgccatcgtgcgtccattcgaggctggcatggccttgtggaaagccggtttctacgtgcgctttggcggtgacacgctgcagttcgggccaaccttcaatagcaagccgcaggacctagatcgcctgttcgatgcggtcggcgaagtgctgaacaagatcgactgatttctccttctatatagaacaactttttcaggagccccgcatgagccttatccagcatttgatcaacggtgagttggtcaatgattccggccgtagtgctgacgtgtacaacccgtcgaccggccaggtgattcatcaagtgccgttggccagccgtgaaaccatccaacaggcgatcgactccgccaaggcagcgttcccggcctggcgtaatactccgccagccaagcgtgcgcaggtgatgtttcgtttcaagcaattgctggaacagaacgaagcgcgtatctcgcaattgatcagcgaagagcatggcaagacgctggaagatgccgccggtgaattgaaacgcggtatcgagaacgtcgagtatgcgtgctctgcaccggagattctgaagggtgagtacagccgtaacgtaggaccgaacattgatgcctggtcagatttccagccgctgggcgtggtggccggtattacaccgttcaacttcccggcgatggtgccgctgtggatgtacccgctggcgatcgtttgcggtaactgtttcatcctgaaaccatcggagcgtgatccgagctcgacattgctgattgcacaactgctgcaggaagccgggttgcccaaaggcgtgctcagcgtggtgcacggcgacaagggcgcggtggatgcgctgatcgaggcgccggaagtgaaagcgctgagtttcgtgggttcgacgccgattgccgagtacatctattccgaagcgaccaagcgtggcaagcgcgtacaggcattgggtggagcgaagaaccacgcggtgctgatgccggatgcagatctggataacgccgtcagcgctctgatgggggcggcatacggttcctgcggcgagcgttgcatggcgatctcggtggcggtgtgcgtgggcgaccaggtggcggatgcgttgatcgccaagctggtgccgcaggtcaaggcgctgaagattggggcggggacttcttgtggcctggatatggggccgctggtgaccggtcaggcgcgggataaagtcagtggctatatagaagacggtgtctcagcgggcgccaagttggtggttgatgggcgtgggctgagtgttgcgggccatgaagaaggtttcttcctgggcggtagtctgtttgatcatgtgacgcctgaaatgcgtatctacaaagaggagatctttgggccggtgctatgtgttgtaagggtggatagcctggaagcggccatgcaactgatcaacgatcatgaatacggtaacggtacgtgtatcttcacccgtgacggtgaagcggcgcgtctgttctgtgacgagattgaagtgggtatggtgggggtgaacgttccattgccggtgccggtggcatatcacagctttggtggctggaagcgctcgctgtttggcgacctgcatgcctacgggccggatggggtgcgtttctatactcgtcgcaaggcgattacccagcgttggccgcaacgggccagccatgaagcctcgcagtttgctttccctagcttataagtagtgctgaaagccggccccttggggccggctttcgcgtttctggggcttttttgacccatgtgacagaaatatgaaaaaaggtgttgacggcagattctggaagtctataattcgccccacttccggcgcagtcgaaacggaaaactccttggtaaacaaagagttacgcagaattcgacagcgacttgcttcagttcatcg

SEQ ID NO: 99 - DNA, 432733 bp, Pseudomonas nodulensis
  misc_feature (401720)..(401744): n is a, c, g, or t
accatagagcattggaaccacctgatcccatcccgaactcagtagtgaaacgatgcatcgccgatggtagtgtggggtttccccatgtgagagtaggtcatcgtcaagattaaattccaaaacccctgactgctaacgcagtcaggggttttgttttgggcggtagaaaactcgagcgctacttatcccccgacaaatttgcacagttatttctgaaccagagcactagaataggcacctaaccatttttagagtcagagccctatctatgcccgatccggctgatgccctcgagctatcggatttaccactggacgacctggtggcatgccatgagtgcgacttgctgatgcgcaaaccggtgctcgccctcggcgaaaaagcccaatgcccgcgttgcggttacgagctgtacgctcaccgccacaatgtcgttgagcgaagcatcgccttggtgctggctgcactgttgctgtatatacccgcgaactttctacccatcatgcagctcaatctacttgggcagtcctccgaggacaccgtgtggagtggcgtcgttggtttatttgacactggcatgcaaggtgtcgcggttgtcgtttttctatgcagcatgggcatccccttgctcaagctgctttgccaattggcagtgctgctcagcatccgctggaatgtcgggcgcagttatgggctgctgctgtatcgcatttaccatcacatgaaagactggggaatgctggaggtctatttgatgggcgtattggtggcgatcgtaaaactcgccgacatggcctccatcacgataggcctggggctggtctgttttatcagcctattggtggttcaggtgttgcttgaggtggtgatgtcgccccaccagatctggcaagcgctatcaggagaggatgatcatgcgggcgattgatgcaggcattctgatttgtaccgaatgccacgagttgaacaaacaagacgctgatagcgacgagcaaacctgcacccgttgtggagcgctgatccatgcccgtcgccccaacagccttacccgtacctgggcgctgctgatcaccgcggcgatcttgtacattcccgccaacctgttgcctatcatgaccatcaattcgcttggtcagggcgaccccagcactatcatggccggggtgattcaactggtgcagcatggcatgtaccctatcgcggctgtggtgttcatcgccagcatcctggtgccaaccttcaagctggtcggcataggtctgctactgttctcggtgcagcgtcaccaaccgctatccgcgcaacaacgcattgtgatgtaccgcttcatcgaattcattggtcgttggtccatgctggatatcttcgtgatcgccatcctggtggcggttgttaactttgggcgacttgccagtgtcgaggccaatctcggcgcggcggcgttcgccagtgtggtgatcttgacgatgcttgccgcagtaacttttgatccccgactgatttgggataacacggagtcggacgacgaccatgagtgatttgcctaaagctaaaacccgcccagcctccaactggtcggccatttgggtgttgcctctgattgccctgatcatcggtggctggctggggtggcgcgcctattcccagcagggcatcgacatccaggtgcgctttgaaagcggcgaaggcatccaggtcaacaagaccgaagtggtttacaaaggcatgccggtgggcaaggtcaaggccctggccttggatgacgagggtaacaatcgcggggtgattgccaccatcgagatgaacaaggacgtcgaacaatacctgaagaccaatacccgtttctggctggtaaaaccgagtgtcagcctcgccggcatcaccggcctggaaaccctggtgtcgggtaactacatcgctgccagccctggtgacggtgagcccacgcgcaagttcaaggcgctctccgaagagccgcccttgtccgacgccaagcccggtttgcacctgaccatcaaggctgaccgtctcggttcgctcaaccgtggcagcccggtgttctacaagcagatccaagtgggccaggtcaaaagctacctgctctccgaagaccagagcaccgtcgagatcaaggtctatatcgaaccgacctacgccagccttgtgcgtaaacacacacgtttctggaacgccagcggcatcagcatcgatgcgaatctctccggcgtgaaagtgcgcagcgaatccctctccagcatcgtggcaggcggcatcgccttcgccacgccggagaaccgcaaggacagtccgcctacggatccgagcctgccattccggctgtacgaagatttcgacgccgccgcggccggcatcaaggtcaaggtcacactctccgacttcgaaggcctgcaggccggccgtacacccgtgatgtacaaaggtatccaggtcggcagcctgaaaacgctgaagatcaacccagacctttccagtgctaacgccgaactgacccttgatcccctggctgaagattacctggtgcaagacactcagttctgggtggtcaaaccgtctatttccctggcgggtatcaccgggcttgaagccttggtcaaaggtaactacatcgccattcgcccaggtgacaaagggacgcctccacagcgtgaatacgtcgcacgggccaaggcaccaccattggacctgcgttcccctggcctgcacatggtgctgttcaccgacaacctcggctccctggatgtcggcagcccgatcctctacaagcaggtcaaggtcggctcggtgcagagctaccagttctcgcgcaagaacaagcagttggtgatcggtgtccacatcgagaaggaatatgaaaacctggtcaacggttcgacacgcttctggaatgccagcggcgtcaccctgaccggtggccttactggcggcatccaggtgaagagtgaatccttggccagcctgatggccggaggcatcgccttcgaaacacctgagcagaacgttccgctgaaaaagcgcatcccgcgtttccgcctgtttgccgaccgcgaggccgccaaccagcacggtaccctggtgaccatcaaggtcgaccgcgctgacggcatgcgccctggtacaccggtacgtttcaaaggcctggacgtgggcaagatcgaaagtgtcgacctcagcgccgacatgcaatcggtgctgctcagtgcgcgtatcacccaggtagcggatcgtatcgcccgcgtcggcagtcagttctgggtggtcaagcctgagctgggcctgatgaaaaccgccaacttggaaaccctggtcaccggtcaatacattgaagtacaaccggcagcaaaaaacgccggcccgcagaagagtttcgtcgcgctagcccagccccctgaagccgcccatcaggaagccggcctgagcctgacactcagcgccgcccgccgtggatcgttgaaggagggcgtaccggtcacctaccgcgaagtcaccgtgggcaaagtcactggctacgagctgggccaaaccgccgaccgcgtgttgatccacattctgatcgagccgaaatatgccccgctggtccgtggcggcagccggttctggaacaccagtggctttggcctcgacttcggcctgttcaaaggcgcaaccgtacgcacggagtccttggaaaccctggtcgccggcggtatcgccttcgccacacccgatggcgagcgcatgggcaatgccgcccggccacagcaaaccttcccgctgttcgacaagtttgaagatgagtggctgacctgggcacctaaaatcccgctcggcaaataagcgccacaaaaaaggccgcgatccatagatcgcggccttttgcatttcagcgcagggcgtcagacttcatccagctccggctcatccgcctgcacattcatcgtcgccttcaccacatcatgacgacggatgtacttccagtccgcctcatcgatgtagatcccattcggcccgctgccaccttccaggtcgatcgccacctgggcggagacctgcggcttcacactggccaggatcggtacgaagcccagctgcaagctggtctccaacagggcagcctggttcttctcatcgatgtccgccgcttcgtcgaggtagtacggcaagcgcacacgcccggcctggtcacggtccatcaagtgcagcaacaagtacatgttggtcagcgccttgatggtcatggtggtgccgttggacgcggcgccatcgatgtcagtgtgaatcaccggctggccatgcactttggtgatctcgaacgccagctcgaacaagtccttgaggcccagttggttatggttggccgccaccagccgcgccaggtactccttggcttcttcgttcttgttgtcctgctcggcgctctggctcaggtcgaacaccgacagggtttcgccttcttcatactgaccggcgctgtggatgatctggtcgatatgcttgagcgcttccttgttcggcgccagcacgatgcggaagctttgcaggttggagacttggcgtttgttgatctcacggttgaacaacgccagttgatgctcaaggctgtcgtagtcgctgcgaatattgcgcaaggtccgtgcgatatcggtgaccgccgcacggcgggctttgccgagtgtcagcgcttcatccgtgcggtgcgcataagcgttgatcagcaattgcaggcgacgctcgacatcatcctcgctgtcgaacttggccacgcccttgaggcgaacctgggcgtacagcgcttcgatctggccatcggcgcgcagcaaaccttgccagctgtcctgatagtcattgagcagcggcagcaggttgtccatggagtcgtcgaccgggtccatgaacggcgtgccgaacggcaagtccgccggcaacaattgacggcgacgcaacgcgtcgtccagcgtacgttgcttggcttccatgtcaccgatctggcggccgaccaattgcagcttggccgacagttgctgaacacgctcggtgaacgcatcactggaacgcttcaactcatcctgcgccgcttccatctgcgccaggttttccagcttctcgccttcttcggcgctcagggtttgcgcacggcggaagtcttcaagggccttttgcgcatcgagcacctgctggtacagcgcttcggtctgcgtcttgctcgcggcacggtcggaggcgacagcctgttgggttttcagctgcttgagttctttctccaggcgctctttctggtcgcgcaacgccgcgcgatccgccagggcctgcaaggccggtggttcgatgtgggagatgtcgatggacagccccggtacttcaaagcgctcacccttgaagccgtcgagtatctgctccagggatttgacccactggccgtcctcgtcaagcgtgatgccatgttcgcccaacggcaggctgaacaacgaactgttgaacaggcgcatcagacgctcgacgtcctgctgtgagaattcctcacgcagtttggcgtagctgttgttgtcggcgtggtcgagttgttgcttgaccgacttcaagcgcttttccaggtcgcgcaggcgctcatccagatcctcggcgctgaactgccgcgactgcgcaagggcacccgccaactcatcgtgggcatccttggccgccagcaactgctgctccagcaccttcacgtcatccaccagcgcaaagcgatgcttgagcaccgacaactcgcccaaccaacgctggataccgctgatttcccgctccaggcgcatcagctcctgggtgccgccacgctgatcgttctgcagcgcgtcctgctcgttgcggtagtgttcggcctgaatcgtcagttcttccttgcgtgcactggcgtagtccgaccaggtgcccagcaacgagtcgagcaatggcgacaggcgatgcaatttgccacgcagcacgtcgcgctgacgaacaccattggacagcgcttcaaccagagggccggccgcgaccagggagttgtagtcctgctccatgcgtcgcacatcgcggaaggcttcttcgcacgccgcgatgtagtccacgctacccgaacgcaggctgtgctcaaacgcatccaggaacaattgcttgagcttggccgcggtgatttcacgcatgtgcagcaggttgataaacagtgcgcggaaggtcttcaggctctgctcgctggtggagcgcagtggaatcaacgtcaggtccagcgggatcgacgtatgcccgcccaccagcaagcggcgcagttcatccggcttgagttcgtaggctttcaggccttcgcgctcgaggttggtgaacagctccttctgacgcaggcaggtgtcattcttctggtagtgcgccaggtccagcttgccggcataggcaaagaactggtgaccgaaaccaccgcccgggccgcgcccgaccacgccgattacatgggggccgtggggcagcgagacttccacgaggatgtagctggtgtcggtggcgaagtagaagcgccgcgattgttccagggtgtacttgccgaaactcatgtccgacatgcgcgccaggatcgggaactgcaaggcgttgatcgaggcggatttacccaggttgttcgcgccatacacggacagcggctcttccagcgggaacaggcccaggctgtagccggcggtgttcaatagggcgaagcggcggatgccgtagcgttccttgctcatgcatcggtctcctgttcttcggcaatggcgcgggccagggcgtcttcttcgctttcatcggcgaagtcgctcaagtcgagtgggtcatcggttttcagcaatttctcatcgctgtcttcgtcgatgatcaccggtgccggcagcggcaacacgctgtgcacgctggctgccaggtcgcggtcttgctgcaccgacaggcacacatcgaggaagcggtgcatcggcggcaggaagcgatagatgccgttgtcttcgctggcaaaacccagctgggtcatgcggcgcatgattttttcttcgagttcttcctgggtctgcacctcggcctggataaacaggtcgcggtacttctccagcaacgatggcagctcatcacggccgaggctgccaccgtcaagcacggcgatcgggtcgcggccctggtcggccaggtgctcgacgatgatgaaggtgaacagcgccaggcgctgggcggtcttgttgacctgcgcggcggccacggcagtgtccggcacgaagtagtagaagccccgcgtgtcgcacaccagctcgaagcccagggccttgaagagcgtgcggtactggtcctggaagttcgacagctgtgcgtacagctccgggtcgcggcggctgacgtggtaacccttgaacagctcgcgaaagatcggcgccagctgggacagttcggatagatcaagatgcatgaggtgtactcgcagggtgctcggcggcgtcggatccggccgggagcagggcgaatgagcgcaggctgacctggtgctcgtgtgtgtggtaatcgcggcgttccaggcgttcgcgcttgaagcgtttttcccgcgagagccgcgagaaccagtacagcaattcgtcggtggcgccgtccggttcctgctccagcagccaggtcatcaggtccggcatcggcagcgcgtcttcgcagcgctcaagcatctccttgaccgtgcgcggtgcacgctgggcgtcgcccttgtgggacttgtgcgccttgggaaagcgcgccggtttcggctcgaaattcgccagggcatacacataggcttccacctggctggcgctgccgaggaaggtgctctgcggccgggtaaacatcggcatcgccgcttgcggcactgcgtccaggcctttgcggcgaatggccgacaaggccagcgccgcaccacgggtcacggcgttgtgccgacgcgcttcttcacgcagcggcagcagcagttcgcgggcatgacgcaaggtcaactgggcgctggtctgcatctccaggatgcgcgcgtgggtgcgcagcaacatgtcgtcgtccaccaggtggccgaggcgctgctgttcggtgagcatgcgcagcaacacattttccaccttgcgcacgccttgttcgaaggcgccgtcggcgttcaccagctggatcatcggttcgacgtattcgtcccaggtcgccaggacctcggcataacgctggcgcaacgggatctgccggtcgctggtcttggcgcggtcggccacggcggcgagggcctgttcgtcgttggcgagttttttcagcacatcgcgcacgcgcatgtcgagcaggcgcagttgacgggccaggtcgtggccatcgcggatgtcgaaggcgtcctggatgtaaccggccaggcgctcgaggtggcgcaggtaggcttcgatttccaggcacaggccaagccggtgctccttgcgaagataagccaggaagtcgtggatctgtgcgttgagctcgaaacggttcgggctcttggcgacaggcaccaggatgtccaggcgaatccacacgtccagcaggctggtgatgtcctgtggcgtgctgtccagttgttgggcggccagttgtgcgcgcagttcactcaggctcagggtgccctggtcgaagtgttcgcacagtggctcaagcagggcccagtgttcggcgagggcgcgcaagacgcgcttgggttcgatcatcggaatggccagctggttggcgattaaaagtcgcgattgtactgcatcggacgcgggatttatccacagccggtcagtacgcagtgggcgattgttgccgaacagcggtagaatccccgctctttagttatccacaagtggccgagctgtgcttatcgagtcccgacgtcgcgcttacttgaccgccatgcaggtggtcaactggctgccccgcaccgaactgccgtttgccgcgccgtcgcggcccgagctgttgcaggcgcttgagccctatgaggcgttcgagtcttcgggcgaggaagcggctgcgccggtggctgtggtcaagcccacgccggaggcgcgaccggtggtcgaacgggccaagatcgaagtgccgcgccccgcgccggtgaccaaggccgccaaggtggtcgaagagacggccccggtggtcaaggccccggtggtgccgccaccgcgctttgccctgcaattgctgcgtgccgggcgctgcctgctgctggtggagttgcccaccggcgaacgtttccagacccgcgaccccgcctacatgctgctcaaggacatgctgcgcgccgccggcctgcccgacagcccgcaaatcgtcggcgacccggtgcgctggccgctgctggtgcgtggcaacatggatcaaggccccgaggccgcacgggattttgtgcaaggttttgtgtctgcgcgtctggaagacgagccttgcgcgtgcctgtggctgatcggcctgcctgccgtgcgttttgccggcgaggccaatgccgaagcctggtaccgcgagttgcaggtcgaaagcctgggcttggtgtgggccttgccgggcctggaattattaatggaagagccacagcgtaaggctgatgtctggcaagccatgcgccggctgatggcgcgctggaaaacaaccgatgagtgaggctttatccttccgcccgatgaccgaggccgacctcgacgccgtgctgaaaatcgaatatgcggcgttcagccacccctggacccgtgggatctttctcgatgggctgggcaaataccagatctggctgatgtttgaaggtgagcagcaggtggggcacggcgtggtgcagatcatcctcgacgaggcgcatctgctgaacatcaccgtcaaaccggaaaaccagggacgcggccttggcctggcgctgctggaacacctgatgtcccgcgcctatgccgccagtgcgcgggagtgtttcctggaggtgcgcgacagcaataccggcgcgtttcgcctgtatgagcgctatggcttcaacgagatcggccgtcgccgggactattacccggctgtcggtggccgcgaagatgcggtcgtcatggcctgcaccctggtcgactaaatacataggccattgtgggaggtggcttgcccccgatggcggtgtaccaggcaccttatcagtctgatatgccgctatcgtgggcaagccccctcccacttttagggcacgttttgtcagcggttaccgtctactggatcaatatctgccaattcggcctcatccaggccattgcccccaccgatctcatcctcatcgacgatactcaggtcccagtccgccggttcgctttcgcccgcttcctgagcatcccgtgctccatcttcatggatcagcgtttcagggctcatgtcatcgtccgtcgcttcatggtcttcggttgaagccccggtcatcccggcctcccgcacccgttcgtcaccgatatgcgtggtgggcgcgtcttcttcaaaatccagctcacgcatcgagcccatgcgatcttcattatcatcaatcggttcgggctgtgtagcgccgtagggacgtcgtgattcagtcatggccaatcctcatactgtggggcttatagtgtgtggacaggcacggagggctaaagattcaagctgattcgtgctgagcgtgacctggacgcggggttgtcagtcacaaaactgcgcatcattcctgaggctttccctgatgaacgaactacaagacctgcttgataacaatgaacgctgggcggacgcgattaaacaggaagatcccgaattcttcgccaagctcgcccgccagcaaaccccggaatacctgtggatcggctgttcagacgcccgcgtcccggccaacgagattgtcggcatgctgccgggtgatctgttcgtgcaccgtaacgtcgccaacgtggtgctgcacaccgacctcaattgcctgtcggtgattcagtacgcggtggacgtgctcaaggtcaaacacatcctggtcaccggccactatggctgcggcggcgtgcgcgcctcgatgcaggaccgccagttcggcctgatcgacggctggttgcgcaccattcgcgacctctactacgagaaccgcgacctgctggcccagttgccgactgaagaagagcgcgtcgaccgtctttgcgagttgaacgtgatccagcaagtggccaacgtcggtcacaccagcatcgtgcagaacgcctggcaccgtgggcagagcctgtcgatccacggttgcatctacggcatcaaggatggccgctggaagagcttgaataccaccatcagtggtttcgaacagttgccaccgcagtaccgcctgcgtccgctgggcgaagcctaagatcgtttacggtcgcgccactgagccatgaacgcctgcccctcggcgttcagcggctcatcgcgaccggtaatccagccccggcagttcaactcgccgcattggcaggcaaactgttggaacagcacgtcttcggtgctggcgtaatccatggtcagcagggtgccggccatgatctcgtgcaaggtccagacctccaggtagtgcaagtcgagaaacacgttcggtttgcacgagtgcgacagcaggccgctgaaccagcagtcgtagaggtggatgcgcgacgaaagctgcaaagtgtgcaggcatcgctcgctcagggcatagccggagatcttggcgatgcacacgcggctgtcaaaggccatgctcgccttgattccgacgcccacgccagcaatgttgtgcaccacctcgaattgcttgcgagttgggtagccttttccgagtttggacttgaaagggtaaaggcagtcactcgcagcggttttagccttatccatggcctgagttttcataactctcctggtttaggctgcatcgacctgcgggtggtggctgactaccagtcttgcagcggatgggcgcggctcaagactcgctgaacatggagccgatttctactgtcaatgttgacagtagaaatcggctgttttttgtgtgatttacagcgccggcgcactgaccgtcggggttggggccgcattgcgcagctgtttcaattgggtcttgatggtgggcgtagcgcacttggcattcgcgtcttgcggggaaagattgcgcaccgaggtgtagaacagctcgcacgtctgctccttgcgcgtgacttgccaggtattcatgcaggccttgagcaagacattcggatcgctcgcgggtttctggcccatcccggcctgccagcaggcggcgctcaggtcctggcccatgaccttcaagccggcctcgtcggctttctgttcgttgccgtcgtaggtgtcggggctcgcggcataccagatgtaactggggtggttcgatcccagcaccgaaacggtttggccggcggcggggctgatctgcgccaggcccagcacgcctaccgtctgcccgtattgttgcttgatccagctgcgcaccggtgcgccgaacgccaccatcggcaacgcccctttggccggcaggctcaactcccggaccatgcgcgtctggtagtcggtgaagtagctgtagacggtttccaggtccttgcctgcattggacggcgcggcgatgggcgcgatatcgatgatggtctggtaagccggcgtttcggtggccgggatgccattgtcggtcaacagggtagcccagcggtcggtggtggccgattccaggtagttctgggcctgggtcagcgagtagtccggcgggaagtgcagcagctcgatgcttttgcgattttccagggccatgcccagcggcaggaacaggtaccagttgtaggcccatttaccatcgctgttgagcttgctggcgccttgataggccaggtcggcggtattgagcagggtggtcagcggttggccataactgtccggcacgccgctgaaggtcgccgatacctggccgtcatgggtcttgacgctgactttcgcccggctgtacccgtcccgttgcaggctctggttcaagtaatgctcggcagtctgttccagcgtccagggccgaaagcagatcacattgcagttattggggaatgcgaacagctgagtcacgcgctgcgtgctccccagcggcacctcgatgtcggcctgtaccgccgcactcgccatcagtgcggccagggtgaaggacagcctggttggtttgaacatggttgtttccttgtcagcgaaagcccgtctgcgcggggtgaaagcccaccccaacacagtagcggctgaccaggaaaaccgcgtgctaaatcaccgggcgtgtcgctattggataagaaaacctacacgctgaactgcaacgcgttgctcaagtcgcccatgggtttctgtccgcgggcgatcatcgcgtcatcgcgctgcttgagaccgtccagggtttccagctggaacacccgggtgatcaggcgcaggatcgacgcggtgtcgtacaccgtatggtccaccgtgcctttgcgggcgaacggcgacaccaccagcgccggaatccgcgtgccagggccccagcggtcgcccttgggcggtgccacgtggtcccaccaaccgccgttttcgtcgaccgtcaccaccaccaccatgtttttccactgcgggctctcttgcagcaccttcaaggcacgggcgatatggcggtcgcccgaggcgacgtcggcatagcctgcgtgcatgttcaggttgccctggggtttgtagaaggtcacggcgggcagcttgccagcctgggcgtcggcaaagaacttgttggtgctcgactcgtcccccaaaccgccatcgcgcaggcgcttgtcgcgctcggtgcggttctcggggccttgctgcttgaagtaattgaatggctggtggtgatactggaagttcgggattttcggaataccgcccgaatccttgaactggtccagcgtcgcttgccacgcgccggcgtaccacgcccagtcgacgttcttcttcgacagcttgtcgccgatgtgttcgtgggtttgcggcaccagcacgttgggcaggtcaggcttggagtagtccgggttttccgggtcgcggatccaggtcggccagtacggtggagccagggtgttcacgccgtagccatccggggtcagcgcgctggggccgaactgcggcgggccggtcatcgcgctggcgggggacttgtccaggggcttgaggcgcgggtcggtcgggtcatcgctttgcagcgtggcgatctgcgccttggccaccgattgcgcggcattcgggtaaaacggcgcggtggcgctgatcaggtattggtgattgaggaacgagccgccaaacgccccctggaagaagttatcgcagagcacaaactccttggccacatcccacaggcgcagggcataacgactctgggtgtaatgccccatcaccaggccgccggagtcggcccaggcgacgaagttgtcattcttgccgccgttgatctgcatctggttctggtagaacacgtgccacaggtcacgggtgaccaggctcaggggcaggtcttcggcgttcgggcccttgagggcgaagggtgcgttgggcaggttttcctggaattgcacttcgctggggtaggtcaccccgtccaccgtttgcgggccgacttgcagcacgccgccccacgtcggaggcaggctggtcaacaagctgccatcgcggtcacgctgctgcgtgtcggcggcggatagcgccgacagcggtttctcaacacccgggaagtccgcaaacaagttgttgaaactgcggttttcggcgtagatcaccaccacggttttcacctgctcacgcaaggccttgtccaactcttgcggcgtcagcggccgcggcaccggtttgcccggtgcttcgctggtattgccgcaggcactcagggtcgcgccaacccccagcaccgccgcgccccccaggaaacgccgacggctggtgtcgacgggcggttgggctgcggaatcgggggaagggcgctcttcgtgctcgtcactcattgcgggggagtccttggcgagatgttgcaagatatttcgcaggacggtagcaatgcaatgtgacggaacgaagacagtgatttgaatcagaggatcacagcagacgcagtgccaactcgctgccggcgcgcaagtactcgacctgggccgtcaccgcgtccttgacgatggcctcgcccgtgtcggtcagcctggctttctttgcatcgatgacactgctctgcaacaactgcatggccacgtcgatcgatttctggaaggcggtcacgttgttgtgcaggccgaactccttgaccacagcggccatgcggcgatctgcgtcgtcgcgcaaggtcctgtattcagtgactgaaacgttgccgtcctggtaaatatcagtgatcaactcttccagtgatttggataggggcgtcatcggagtttccttggtgctaggtgagtaggagtccgagtcaggttaatcaacggtattggtgggtgaagccgggggttgccgttgtctggagtaggacaaccccacgcgttagatcagaaggtgcttttagggcatcaccggcggcaaatacttcaacgtcgtccccagcgcccacagcaggaacaacaccagcggcgtatgcaccagcaactgcacgaacgagaatccgatcaagtcccgtgccttcaaccccaatacccccagtagcggcagcatatagaacgggttgatcaggttcggcagcgcctcggcggcgttgtagatctgcacggcccagcccaggtggtattgcaggtcattggccacttgcatcacgtacggcgcttcgatgatccacttgccaccgcccgacgggatgaagaagcccagcaccgccgaatacacgcccatcagcagcgcgtaggtgtcgtgggacgcgatggaggtgaagaaggtcgagatatggtgcgccagggtctggccgtcaccgcccttgaccaccgtcatcagcgcggcgatcgagccatacagcgggaactggatcagcacgccagtggtggtcggcaccgcccgcgccactgcatcaaggaagctgcgcgggcgccagtgcagcagggcgccggtcatgatgaacaggaagttataggtgttcagccccgagattgcgctgatcgccggtttggtcgagaactcatggaacagccaaccggccgccagcaatgccagcaggatggtcagcaaggggctgtgctcgagccactcacccgggcgggcgggggcttgcagtttgggcaggttgaacgccgggtcgaccccacaggccttggcatcgcgggcgctgttcgggccgggtgcggtggcgtaggcgatgatcagcgacaccacgatcaacgccagcaacagcacgccggattgccacaggaagatggtatcggtgaacgggatcacccccgtgatcgacagaatcgacggcggcaggctcgccgggttggcctgcaactgagccgccgatgacgacagccccaacgcccacacggcgccgagccccagatacgccgccgcaccggcagcacggtaatccatgcgcagatccgtgcgacgcgccagcgcccgtaccagcaaaccgccaaacaccaaggataagccccagttcagcaacgaggcgaccatcgagatcagcgccacccaggccacggctgagcggccgttcttcgggatacgcgccaggcggtcgatcagtctcacggcgggcggcgagcttgccaccacatacccgccgatcaccacgaaggccatctgcatggtgaacgggatcaggctccagaacccatcaccaaaagccttggcggcttcggtcggtgcagcgcccatgcccagcgtcgccacggcgacaatgatcacggcgagggcggcaaatacccaggagtctggaaaccagcgctcggcgaaattggagcagcgcagggcaaatcgggcatagcggctttcttcgatagcatcggccatgagtctttcctcttatagttattagggggcaggcgattttccggcatgttccgctacggcctttgatatgggaatgcagttatcttcatcgatccatgaggaaaacaaatatatctgctgtgattgccatcattgggctcagctcataacctgcacgccattttgtttgtctgccgagcctctacatgactgccacctttcctacgcaggcgcagcgcttttcccgctccgactacaaaaccctgggcctggccgccctgggcggcgccctggaaatctacgacttcatcatcttcgtgtttttcgcgctgaccttgagccaactgttcttcccgccggaaatgcccgagtggctgcgcctgctgcaaagcttcggcatctttgtcaccggctacctggcgcgcccgctgggcggcatcctgatggcgcacttcgccgatcacctggggcgcaagcgcgtgttcagcctgagcatcctcatgatggcgttgccctgcctgctgatcgggatcatgcccacctacgcgcaaatcggttacttcgccccgctgatcctgctggcgctgcgcgtgctgcaaggcgcagcggtcggcggtgaagtgcccagcgcctggaccttcgtcgccgaacacgcaccgccccatcatcgcggctacgccctgggcttcctgcaagccggcctgacctttggctacctgctcggcgccctcactgccacactgctggcgcaagtcttcacccctgcagaaatcctcgactacgcctggcgcttcccgttcctgctcggcggtgtgttcggcgtgatcggcgtgtggctgcgccgctggctcagcgaaaccccggtgttcctcgaaatgcaggcccgccgccatgccgctgccgaactgcccttgcgcaccgtgctgcgcgaccaccgcgccgtgctgctgccggcgatgatcctcacctgcgtgcttacctccgccgtggtggtgctggtggtcatcaccccgaccatgatgcagaaaaccttcggcatgagccccagccacaccttcgccttgagcgccttgggcatcgtgttcctgaatatcggctgcgtactggccggcctgctggtggaccgcatcggcgcctggcgcgcggtgctggtctacagcctgttgctgccggcggggatcgcggtgctgtacgccagcctgatcaacggcggaatctggctgggcgcggcgtatgccgtggcgggcctcagttgcggcgtggtcggcgcggtgccgtcggtaatggtcggcctgtttccggcgcaggtgcgggtgtcggggatttcctttacctacaacattgcctacgcgctgtgggcgagtacgacaccgttgatgttgattgcactgatgccgaccagcccgtggatctgcgtggggtattgcgtggtgatgggggcggtgggggtggggagtgtggcgttgtttggaaaacgccacacgttggctgcgtcggattaagtcaagaagtgccaaagcaccagcgtccccaccagaccgacgactgagacaatcgtctgcaacaccgaccacacccagatcgtctgcttcaactgcaagccaaagtactcacgcaccatccagaacccggcgtcgttgacgtggcagaagaacaccgagccggcgccgattgccagcgcgaccaacgagctttgcgtcaccgccagcccggccatcatcggcgcgagaatgcccgccgtcgtggtggtggcgactgtcgccgaacccgttgcctggcgcaacgcaactgcgatcaaccacgccagcagcaggtacggcatgtgcgcgccttcggcgaccttgctgatggtctggctcacaccagcatccagcagggtttgcttgaggccaccgccagcgccgatggtgagcagcaagacggcgatgggggcgagggctttgcgcagggtgttgcccacgtcggccctaggcatgccagcggcccagcccaggcagattacggcggcgatcacagccaggccgagggcgatcagcggttcgccgagaaacttcaaggtcaggccgagggtgctttccgccggcagcgcgaccttggccaaggtgctgcccagcatcaggatcaccggcaacagaatgatcagcaacgacacgccgaagcttggttggcgcggcgccttgggcggtgcgctgaacagtgcgccgatgtccgccggttcatccacctgcaggcgcttggacagccagttgccgtagatcgggccggccaggatcaccgctggcaccgccaggcagaagcccagcaacatggtcaggccgaggtcggcgtgtaacgcgcccaccgcaatcagcggccccggatgcggtggcatcagggcgtgcagggtggtcatgccggccagcgccgggatggcgattttcagcagcggctggttcgaccgcttggccattacaaagatgatcggcaccatcatcaccaggcccacttcgaagaacagcggcaggccgatcaccatcgccacgagcgccatcacccacggcaatgacttgcccttgcccagcccgagcagggtggtggcaatgcggtcggccgcgccggattcggccatcaatgcgccgagcatcgagcccagggcaatgatgatcccggcctcaccgaggatcgccccggcacctttgctgaaggccttggcgacttcttccggcggcaggccggcgccgacaccggcgatgaaggtgccgatcaggatcgacaggaatggcggcaacttggtcgcgctgatcagcacgatgatgctggcgatggccagcagtacacaaaacataaggcgagtgtcgtgaaccatccacgcggcagtcgataactccaaggcgggactccttatcgaacaggttgggagaattgtttctttttgtttcctgcccgaaaagcatacctgataccgcgatagccaagtgcttatgtatcgttttggtgcgatcagcgacaggccgccgaaatgcccgccgcagagccattgctgtcggatttgtaatctttgctccaccgccctgataagtcgtgaccgctacattgccccggctagtatttcttgggcgtggaactctcgttatggcaatttccgttagaaaactcttgggggcgggggcgttgtggctggtcgctagcgctgcccaggcacagaccctcaccctcaattcagccctgcaaaccgccttcgccaataaccctgacctagcggccgcacaatgggaaatcgacatcacccagggcggccgccagcaggccggtttgatccccaacccggtgctctcctgggatgccgaagacacccgtcgcaactctcgcaccacctccatcaagctcagccagaccctggaactgggcggcaagcgtggtgcgcgcattgacgtggccagccgtgcccaggacgccgccgccctgaccttggaacagcgccgcaacacactgcgcgctgacgtcatcgacaactactacggcgcgttgcgtgcccaggagcgcctcgacctggcgcagcgttccatggctgtggccgagcgcggcctgggcgttgccaatggtcgcgtcgcggcgggcaaagcgtcgccggtagaggcaacccgtgcgcaggtacagctatcggaaatgcgcctggaattgaaccgcgcacaggtcggcctcaccgacgcctatcgccgcctggccgcgagtactggcagtgccggcgcggatttccaggtcgtcgccacacagccccaatccacaccgcccctgccgccggttgcgcagttgttgacgcgccttgagcagaccacggaactgcgcctggccgaactgaacatcctgcaaaacgaagccagcgtcggcctggaaaaagcccagcgcattcccgacctcgatgtgtccatcggcagccagtacgacgctagcgtgcgcgagcgcgtgaacctggtgggcgtatcgatgccgatcccgctgttcaaccgcaatcagggcaacgtgctcgccgccacccgccgtgccgatcaggcccgcgacctgcgcaacgccaccgaactgcgcctgcgcaccgaaacccgccaggcgctggacctgtggcaaaccgccaataccgaagtgcgcgcattcaaccagcagatcctgcccgccgcgcaaagtgcagtggacagcgccacccgtggtttcgagatgggcaagttcagctacctcgacgtgctcgatgcgcagcgcaccctgatcgctgcgcgcaaccagtacctcaccgccaccgcccaggccactgacgcctgggtgcgtatcgaacggatctacggcgacctcgcccggttttgattgtctttggagtcctttatgaacaaccgacacggtgtggcacttgccgttgccctgggcctgatgctgtccggcgttgcctgggccgatgaagaagaaggcgcacttgaactcaccgaacagcagatccaggctgccggcattcaactggccctggccgaaccccgcagcctcagcacgatgctggttctgccgggcgaagtgcgtttcgacgaagaccgcacctcccacatcattccgcgtgtggcgggtgtggtggaggcggtcaaggccaacctcggccagtcggtgaagaagggcgagttgttggcggtgattgccagccagcagatctccgaccagcgcagtgagttggccgccagcgagcgccgggttgagctggcgcgcaccacctttcagcgtgaacggcagttgtggcaggacaagatctccgccgagcaggattatttgctggcgcgccaggctttgcaggaagccgagattgccctcaacaacgctcgccaaaagatgagcgcgttgagcggcagcgcggtgctggtcggcggtaatcgctacgaactgcgcgccccgttcgccggcgtggtggtggaaaaacacctgggcgtcggtgaagtcgtcagcgagaccagcaacgctttcaccctctccgatttgtcccaagtgtgggtgaccttcggtgtgtttcccaaggacttgaacaaggtccgggtcggcaaaccggtcaccgtcagctccagcgaaatgggcaccgaagtgcagggcactgtggcgtatgtcggcaacctgctcggtgaacagacgcgcacggccaccgtgcgcatcagtgtgcccaaccccgacgacgcctggcgccctgggctgtttgtcagcgtgcaattggcgacggattcctaccaggccaaggtcaccgtcccacaggccgcgatccagaccgtcgaggacaaaccctcggtgttcgtccgcaccgcagagggttttatcacccgccacctggagctcggcgccagcgaaaacggctacgtcgaagtgcgccagggcctcgacgccggggcgcaggtggccacggtcggtagcttcatcctcaagtccgaactgggcaaaggctcggccgagcacgcccattgatcctgcgagtgattccccatgtttgagcgccttatccaatttgccatcgagcagcgcatcatcgtgctgctggcggtgctgttgatggccggtgtcggcatcgccagctaccagaaattgcccatcgacgcggtgcccgacatcaccaacgtgcaggtgcagatcaactcggcggctgccgggtactcgccgctggaaaccgaacagcgcatcacttttcccatcgaaactgccatggccggtttgcctggcttgcagcagacccgctcattgtcgcgttccggtttgtcccaggtgacggtgatcttcaaggacggcaccgacctgttcttcgcccgccaactggtcaacgaacgcctgcaagtggctcgcgaacaattaccttctggcatcgaaactgtcatggggcctatctccaccggcctcggggaaattttcctatggaccgtcgagtccgaggacggcgcccgcaaagaggacggcacgccgtacacgcccaccgacctgcgggttatccaggactggatcatcaagccacaactgcgcaacgtgccgggcgtggccgagatcaacaccattggtggcttcgccaaggagtaccagattgcccctgaccccaagcgcctggccgcctataacctgaccctgaatgacctggtcacggcgctggagcgcaataacgctaacgtcggcgccggctacatcgagcgcagcggcgagcaactgctgatccgggcgccggggcagttggcatctatcgatgatatcgccaacattgtcatcaccagctcggacggcacgccgattcgcgtgcgcaatgtggcccaggtcgagatcggccgcgaactgcgcaccggcgccgccaccgaaaacggccgtgaagtggtactgggcacggtgttcatgttgatcggcgaaaacagccgcagcgtgtcccaggccgtggcgaaaaaactcgaagagatcaaccgctcgctgcctaagggcgtagtggcggtcacggtctacgaccgcaccaacctggtcgaaaaagccatcgccaccgtgaagaagaatctcttcgaaggtgcgctgctggtggtggcggtgctgttcctgttcctcggcaatatccgcgctgcgctgatcaccgcgatggtgattcccctggcgatgctgttcacttttaccgggatgttcaccaacaaggtcagcgccaacttgatgagcctcggcgcgctggacttcggcattatcgtcgacggcgcggtggtgatcgtcgagaacgccatccgccgcctggcccacgcgcaacagcggcatggtcgcctgctgacccgcagcgaacgcctgcatgaagtattcgcggcggcgaaggaagcgcggcgggcgctgatcttcggacagctgatcattatggtggtgtacctgccgatcttcgccctcaccggggtggccgggaagatgttccacccgatggcatttaccgtggtgatcgccctgctgggcgcgatgatcctatcggtgaccttcgtgccggcggcgattgcgttgttcgtcaccggcaaggtcaaggaagaagaaaatatcgtcatgcgcagtgcacgccgagtctatgcaccggtgctggactgggtgatggcgcaccgatcgctggtgttcagcctggccgtactgaccatcgtcgcctccggcgttgtcgccagccgcatgggcagcgagttcatccccagcctcagtgaaggcgacttcgcccaacaggccttgcgcgtgcccggcaccagcctgacgcaatcggtgcagatgcagcagcagttggaaaaaaccttgatggcccaggtgccggaaatcgagcgcgtattcgcgcgtaccggtacggcggaaattgcttcggatccgatgccaccgaacatttctgacagctacgtgatgcttaaacccaaggaccaatggccggatcccaagaagtcccgggaaaccctgatcgccgatatccaacgtgccagtgcgattgtgccgggcagtgcgtacgagttgtcgcagccgatccaactgcgcttcaacgaactgatttccggcgtgcgcagtgatgtggcggtgaaggtgttcggcgatgacatggacgtactcaacgccaccgccggagaaatcgccgaggccctgaagaaacttgatggtgcttcggaagtgaaggttgagcagacctccggcctgccggtgctgaccatcaatatcgaccgcgacaaggctgcgcgctttggcctgaatgtgggcgatgtgcaggacaccattgccgtcgccgtgggtgggcgccaggccggtacgttgtacgaaggcgaccggcgttttgacatggtcgtgcgtttgtccgacgcgctgcgcactgatatcgacgggctgtcacgcctgttgattccggtgcccggtaatgcgtctggccagttgggttttatcgccttgtcccaggtcgccagcctggacctggtgctcggcccgaaccagatcagtcgcgagaatggcaagcgcctggtgatcgtcagcgccaacgtgcgggggcgggatatcggctcgtttgtcgaggaggccgaggccgcgctgatcgcccaggtgaaagtgccggcgggctactggaccacctggggcggccagttcgaacagctgaaggaagcctccgagcgcctgcgcatcgtggtgccggtggcgttgctgctggtgttcggcctgttgttcatgatgttcaacaatctgaaggacggcctgctggtgttcaccgggattccgttcgccttgaccggtgggatcatggcgctgtggctgcgggatattccgctgtcgatctcggcgggcgtgggctttatcgccttgtccggcgtggcggtgctgaacggcctggtgatgatcgcctttatccgcaacctgcgtgaggaagggcgctcattgtcgatggcgatcaacgaaggcgcgctaacccgactgcgcccggtgttgatgacggcgttggtggcgtccctcgggtttatccccatggcgcttgccaccggcaccggcgccgaagtgcagcggcccttggcgacggtggtgatcggcgggatcatttcctcaacattgctgaccctgctggtgctgccggccctgtatcagtgggcgcatcgcaaggaagaggaaacaccaggctgaaccgtgtgaaccggcccggctggctgctgacctcggcgtgcccctgatgcaggtgcatgatcgactgcacaatcgccaggccgaggccggtgccgccttcggcgcgggtacggctgctgtcggcgcggtagaaacgttcgaacaggtggggcaagtgatgggcctcgataccgcgccctgggttgccgaccgacagcgacacgttctggtcgtagctttctaccagcagcaacacgctggagtcgcagggggtgtggcgaatggcattggacagcaggtttgaaatggcgcgctggatcatcaagcggtccccggtcacccaggcatcaccgcgcaggctcagggtcacgtgcttgtcttcggcgctgagggcgaacagttccatcacccgttgcgcttcctcggccaacgacaccggggcaaattcggcccgtgccgccgggtgactgacctgggccaggaacaacatgtcggacacgatccgcgacagacgctccatttcttcggtgcaggattccaggctggccttgtactccgccgagggccgctcgcgggacagggtcacctgggccttgcccatcaggttggtcagcggggcgcgcagttcgtgggccagatcgtcggagaactgcgacagctgctgcaccccggcgtccaggcgatgcagcatgaaattgatgccctgggccagttcgccgagttccttgggcaggttgtccagggccaggcgatgggtcaggtcctgggtgctgaccttggccgccacccggctgaactgctgcaagggcgccagcccgcgttgcaccagccaccaggcgcccatgccgatcaggatcagcagcatcggcagggcgatcaccgtggagcgcaggtaggcactgagcagcgcttcatcgtcggaacggtccagcgacagcagcacgcgcacgtattcgcccccttgcaggggcatcaggcgcgtagcgctgagaatacgattgccctggccatcgacccagttcagataggccaggtttttgccggtgggcacatcgagtaacagcggttgctggggcttggcgccgacgctgaggagtaccggtgcatcgggccgtgcgccgatgatggtcaggtagatgttgtcgtggcccatcaccaggtccagcagtgaatgggggcggttggtgatgcggtgttcatcgaggccctggccgagggtatgggccagttgctccattttgttttccaggcccttgcgtgcgagcttgtccaactcgtgggtcagggccaggtacgccagggttgccagcagcacaaccaacccggcgcccatcaggctgacggtcaaccccaggcgcattgacaggctgctggtcttcatggccgcgcctccagcacataacccacgccgcgaatggtgtggatcaacttcacctcgctctggtcatcgaccttggcccgcaggcggctgatggagacctccaccacattggtgtcgcagtcgaagttcatgtcccacaccagcgagatgatctgcgtgcgggtcatcacctcgccgttctggcgcatcagcacgtgcaacagggcgaactccttggtggtcaggtcgatccggcggttgccgcggtaggcgcgatgccggcgcgggtccagttccaggtccgagacgcgcagcacgtccggcaccgggatgtgctcgctgcgccgcagcaaggtgcgcacgcgggcgagcagttcgggaaactcgaagggtttgacgaggtaatcatcggcgcccatgtccagacccttgatcttgtcggccagccggccgcgcgcggtcagcatcatcacgcgctggttgccgtcgcggcgcagttgctccagcacttcccaaccgtcggtgttgggcaggttcacatcaaggatcaccaattcgtagctgtgctgccgggccaggtgcaggccatcgatgccgctggcggcgcagtcgacgacataaccgctttcggtcaggccttgctgcaggtagtcggcggttttttgctcgtcctcaaccacaaggatacgcatggggagttaccttcatagaaaacgaaaaggggcatggcctcatggcgaggcgggggaggctgtaggaaaactctgaaccgtgaagtagctttagggtcaagccatgtcaggcaggtgcgacgattcgtcactgcgcctgcacacaaaaaaaacgccccgagcggggcgcaaaaattcatctctgttccaaaggagctacacaaaagccgcagagatgagatgtgttcggtgtgcagtgtagaaagtgcaacttaacaagagagtgagacgaatattacagttctgacagacttcaacctgtgaagagatgtagcgcatcggcaagtgaatgtaattggcctcccttaaagcactgcaattggatactcgataatcagcctaacttcttccaagtccgactcgaatgcacttgagcgcacggttgcctggcgcagtcgcagtgataagtctttcaagtttccactttgcaccacgtatttggcctcgatatcccgctcccagcggcgttgatcggtcagtggggtgccagctgcatcgcgacgcatgtacaccgcgttggcgttgctgtagtcggcgccggtgcctttgccgtagcgagtcatgaacgacaggccggggatgccgaatgcctgcatgtccaggtcgtagcgcaccatccacgagcgctccttgggtgagttgaagtcgctgtactggatcgagttgttgaggaagatcgagtctgactggcgcaggtagtcgaagtcgtcatcgccgttgttgcgctggtgggaaagggccaggctgtgggcgccgaccttcaccccgagcctggcgctccagatgttgttatcgaattcaccgagttttttccggccttcgtccaccgccttgtaatagttgacgtcgccgaacagcgagacttcttcagccagcggatagctggcggcgctgccgaggtagtactggtcccaggcgtctttcaagcggctgctgtagagactcacgctgaggtgttggttgacggtgtaatcaccgccgaaatagccgatccagggtgagtcgacgggcccggcgtagaaggtcgcgaagcctttgtccatgccactttcgctcggctggctcatgccgctcaagcgcccgccttgcagggtcaggccctcgaggctggtgttttgtgcggtcacgccacgaaagctttccggcaacacgcgtgaatcgccgtaggccacgaccggcgtcagcgggaatacgtcgccggccttgatgacggtatccagcacgcgcagtttcgcggcaccgccgactttactgtaggtgtcctcggggtgattttcgctgtctaccggcagcacgccgaacgaacctttgccgccgctgcggccggtgcccgagtccagctttatgccgaccatggcgaacgcatccacgccaaagcccacggtgccctgggtaaagcctgattcgaagcggccgatcaagccctgcgcccaggcctctgaatagccattgccggtggggctggactggcctttgcgatcatcgcggttgaagtagaaattacgcgccagcacattgaagcggctgccttcgataaagccctcgggcgggtcctccacggccacggcagccagcgggaaagcggcgcacagtgaaaggggaaggctgtaatgacggatacgcatggttcgctcctgggtgttggcagtttcagcttcttatgagagtgggcgttcttattgatttggcccgggctgatagttgcaaaccacagataacgaagaagtggcgcgaagattacaattctggaagctcacacttatctaacaaataagtaatgttctggtgaagatgacgtcagggtcagttggttagtctgggcactgaatttttcagtcgaggaactaatcatgaaactttataaattcgcgctgggtgttttaactgcaatcttgtcgttcggtgcgttggctgaaggtgggggggatcgtacgttcgcactgatgatggagcgtaatgaaaaagccatggccgactacgccgccaaaaagggcaagccggcgcccgaggtgcaggcctatcgctatggcatgaagctggacattgccaaggtggttaatgtcacgccgccgatccgctcgtgcaacccggtgccgtcgcgcatgacctatgaagactccagcggcaagctcaatacccttgagtatcaagtgatgggtgtgtgccgaaataacggtggctgatggatccaaaaaaatagtttggccagggcctgaagcccgcttaagaaaatgccggcagcgccgatgcaggtcagattcctctccctcatttgaccatcggtgccccatgttcaacacccgtttgaagcaggagctgtcggctcttcgcgaagaattatccagcttgaatcaggtcaaggagagcctggaaagtgaaatgctgtgcctgacgctggacgccgaaggccgggtggagtgggccaacgccaacttcctgcaggaattggcctaccagaatggccaactgctggggcgcgcgatcgaagacctggagccggcccacgtgcgcagggatgagttccagcaacgcttcaagaatgccctggtgcgcggtgaacatttcgccggcaccgtgcgcctgatgcggggcaatggccaggaagcctggctgcgctcgattgtgcagccggtgcgcagctccgatgggcgcatcaagcatttttcaatctattccagcgacctcacccgcaccatcgaggcctcccgcgagcatgaaaacctcatgaacgcgctggtgcgctctaccgccgtgatcgagttcgacctcggcgggcacgtgctgaccgccaatgaccgtttcctcgggggcatgggttacagcctggcgcagatccagggcaagcatcaccggatattctgcgagccggaggaatacaacagcaccgagtaccaggacttctggaagcgcttgaacgccggtgagttcgttgcggcccgcttcaaacgggtcgacagccatggtcgtgtggtgtggctggaagcgacctataacccggtgctggacgccaatgaccggttgtacaaagtagtcaagttcgccacggtcatcaccgatcaggtcaaccaggagcaggcggtcgcggaagcggcgaacattgcctacagcacctcgctgcaaaccgacaacagcgcccagcgcggcaccacagtggtgacccaggcggtggatgtgatgcgcgacctggccaagcacatgcagcaagccggtgacggcatcgaggcgctgaacgcccagtcccaggtgatcggtaccatcgtcaagaccatcagcgggattgccgaacagaccaacctgctggcgctcaacgccgccatcgaagccgcgcgtgccggtgaacagggccgtggttttgcggtggtcgccgatgaagtacggcagttggcctcgcgcactagcaaggccaccgaggagattgtcggcgtggtgcgtcagaaccaggacatggcccgcgatgcggttgccctgatgaccgacggtcgtttgcaggccgaacaaggcctggcgctggctgccgaagcgggcacggtgatcgtggaaatccaggacggtgcgcagaaggtggtcagcgcggtggggcagttcgccaaccaactgtcgagttgagcgtagggcttcaggtatcgtaggggctttctggtatgaagagtcgactgtccatgagccctacccaccgtcgccccgtccctctgtccaaggcctaccgcttgctcaaccatggccctacggtgctggtgagcgctgcccacaacggccagcgcaatatcatggcagcggcctgggccatgccgctggatttcgaaccgccgaaagtggcggtggtgctggacaaggccacctggacccgccaactgctggaaggcgccggcacgtttgtgctgcaggtgccttgcgtggcgcaggccgatctggtgcaaaccgtcggtaacgtcaccggtgccgacaccgacaagtttgccgcttacggcctgcaaacattcaatggcgaatacactcaggctccgctgctggaaggctgtgtggcctggctggaatgtcgtctgttgcccgagccgcataatcagcagacctacgacctgttcctcggcgaagtggtcgcggcctatgccgacgagcgtgtattcagcgacggccgctggcacttcgaagggcatgatcaactgcgcaccttgcaccatgtggcgggcgggcattttctcagcatcggccagccgattgatgggcacgcgctctaagccttgtcagcgcccgagcatcttcacccagcgcgacggcggcatgccgtaggtgctgcgaaattgccgggtcatgtggctctggtcggtgaagccggccatcattgccgcgtccaccagcgattggccctgggccagcaggctgcgcaccaggtccaggcggcgcatggtcaggtagcgataggggctggtgccgaacagcaggcgaaaatcccgcgacaaggcccagcgatcgcgaccggcgtggtcggccatttcatccagggtgatgctgcggcccagggcactgtggataaattcgcgggcgcgctcggcggccacgtagtcgaaggtcttgcggctgatgatcccgcccgagacgttgttcagcgcgtgggccaggtcgaacagggcgtcctgttcctgcaatgggtcgatggggttgtcgaggttctgcagcaacacctcactggcgcggaacagcctgggatcggtggacaggccgcccgcgataaacggcaacggcttgccgccgaggatctgctggatcagcgagggctcgacgtaaatcatccggtatttgaagccctcttcgctgccggcgtggccgtcgtgggtttcatcggggtgaagcaccatggtggtgccgggcacactgtggatcatgtcgccgcgatagtgaaagctctgcacgcctgtcaacgtacgcccgatggcgtaagtgtcgtggcgatgcgggtcgaaggcgaagccggcaaagtatgcctcgatgcgatccaggccactggcatggggcgcgcggtgcagccagtcgagggtggcggtgggtttgcccatggtgaggggtcacaaaaaagagagggaaatacgttaacccagtctgcatcccttgtctgccggggtcttgtacgattgtgcgagtggagtaggcaacgctcgactgtattatttttgtattgttttatgagtaattattatttttttacgataattttttcgctatcttgcctcgacattcctttcgagaggcattttatgaacacccaccgtcttgcccaactcagccagcgtatgtcgacgatcacactcctgttgatcatcaccatgctcgtgctcaatgctgctgtctggctgtttccggtattgagttcctctgctgatggactcgggtttggcttcgctctgagcgatcgtcagattcaagggcgcgtcgagcgggtggccttgttccccttgtggcaggttctgggcgccatcgtactgtccagcgtccccctgatggcactggcgtgtggcttgaatcacctgcgcaagctgtttcagaactatgcgcgcggcgagtatttctccagttcggcagcgttgcatttgggcaaggtcggcaaagcggtggcaatttgggtcttgctggattttttatgtgaaccgctgctgagtgtctgggtgacgatgaacgagccagtcggccagcgaatgatcagcctgagtgtgacggcccccagctttgtggcattgttcctggcagcctgtatcgcggtcattgcgcgtatcctgtggcaggccaatgaagtggattctgaaaaccgcacgtttgtatgagattcaaatgcccatcgtgattgagctggacgttatgcttgcccgacgcaaggtcaaatccaaggacctggcggcggctatcggaattaccgaacagaacctgtcattgcttaaacaaggcaaggtcaagggcgtaaggctggggactctggatgctatctgcgcctacctggattgccaaccgggtgacttgcttgtgcatattcccgcgcctgctgacgaccagtagccgcttatcaacatcgcaagagggaccgtccgatgctgttctccaacctgccgtacgccgcgccgttactgtcattggcgttgctctggaccgttgcggtagtgacgcccggccccaactttttcaacacggcgcaactggccgccagttgttcgcgccgccatggtgtggtggcatcagccggagtggccacgggtacgatcatgtggggcctggcgggtggcctgggcatcaagtcgctgtttacggcggcaccgatgctgtacctggcgttcaagatcatcggcggctgctacctgatctacctcgggttgaaactgttcaagcgctcttcaccgagcatgagccagaacgtgctgccggacgaagcccggcgttcgctgttttccgcgtggcgcctggggttgctgggtaatttgtccaaccccaaggccgccttgtttgttgccaccatcttcgcgtcaaccatgccgccctcgccgtcaccgatgttgctgaccctggcggtgatcaccatggccaccttgtcgttcagttggtattccagcgtcgccctggtgttttccagcgaacgcatggccacgctctacagccgatcgcgcaagtggctcgaccgctttgccggcggttgctacgtgttgttcggtgcacatctggtagcgaatcgctgacggcccgtggtaagaagccttacgttcaacagtgaggtcgggtcatgggcaaggtgcgggtaggtattatttttggtggccgttcggcagagcacgaagtgtcgttgcagtcggcgcgcaatatcgtcgatgcgctcgaccgctcgcgcttcgagccggtgttgatcggtatcgacaaggccggccattggcacctcaacgacacctcgaacttcctgctcaaccaggaaaacccggccttgatcgccctcaaccagtccaaccgtgagctggcggtggtgcccggcaaggccagccagcagctggtggagacttccggcggcggtctgttggaacatgtcgatgtgatcttccccattgtccacggcaccctcggcgaagacggctgcctgcaaggcctgttacgcatggccgacctgccttttgtgggttccgacgtgctcggctcggcggtgtgcatggacaaggacatcagcaagcgcctgctgcgcgatgccgggattgccgtcacgccattcatcacccatacccgcagcaatgcggcgcgtacttcgtttgaggctgcggtgaacaagctcggcctgccgatgttcgtcaaacctgccaaccagggttcctcggtaggcgtgagcaaagtcggcgacgaagccgagtaccaggcggccgttgaactggcgctgggctttgatgaaaaagttctggtcgaatcggcggtaaaaggccgcgaaatcgaatgcgccgtgctgggcaatgaacaccccatcgccagtggttgcggcgagattgtggtgagcagcggtttctattcctacgacagcaagtacatcgacgaccaggccgcccaggtggtggtgccggccgatatcagccatgaagccagcgagcgtattcgtcggttggccatcgaggcctttgaggtgctgggctgttccggcctggcacgggtcgatgtgttcctgaccgacgatggcgaggtgttgatcaacgaaatcaactcactgcccggttttactcgcatcagcatgtaccccaagctgtggcaggcggcgggcatgagctacagcgaactggtgagccggctgatcgagctggcgctggagcggcatgcggggcgcaaggggttgaagatcagtcggtgatgcgagcaatccacgaataaatcagtgtctttacttcctccgggtgatgcgtccttcggcggtaactggcaaaggtgggggaggtgcagtaagtgcacacctcactcacctcgatttgttcacgccggatgccggcagcttgcagcaacatcacgccatacccgctcaagtcaaaccacgcgcttgctgcttgcctggcgtggggcggtgcaatttgcgggggcaataacggtgcgggttgcgctgtgctccacggcgcccgcccggttgaccacaggtgcccctgatcagcctggaactgcgcaacaaacccctcgctcacctcatagcaacacggtttgatcgacggtccgatcgccgcgcgcaactggtcgactgcaattccttcgtcggtaaaacgcttgattgcattggcgatgatcccgctttgcagccccttccatccaccatgcaccgcagcgaccttttcgccgttttgcgcggcaatgagaaggggcaggcagtcagcggtgatcaccgcgatgggctgatgctcacctgtgcacaccccgtccgcctcaacggtattgggtacctggtcggcttgccactcgatcaccgaggcgctgtgcacctgcttgcagataaacacctctgccgggcgcagcggatcgttgatcgaacaaaaaccatgatcgacgccaggaatggcgccgagattatcggcctgatgcacgcgtgttttctccgttgattgaagtgttcagtcgccgaccgcttcgccttcgcgccgcgggtcggcgccgccgctcagcgacaccttgccctgggcatcccgcgtgcgaacgatggcctggatgccgctggtcatatcgatctcgctcagcgcatggcccttgtccttgagggcctgtttcagtgcagggctgaacaggccgctttccagctcggtcgcgccgttacggctgccgaaattcggcaggctgatggccgcttgcgggtcaagtttccagtcgagcatcgccaccagggacttgctcacgtactcgatgatttgcgagccgccgggcgagccgagcgtggccagcagctcgccgctcttgcggtcgaacaccagggtcggcgccatggccgaacgtgggcgcttgccaggctcgacgcggttggccaccggctggccgtccttctcggggataaacgagaagtcggtcatctggttgttgagcaagaaaccctggaccatcagatgggagccaaacgccgcctccaccgtggtggtcatcgacacggcaccaccctggtcatccaccgccaccacttgtgaggtggagatgcgcagcggcgagcgatccggcgcataagccacctggatacccgccggtacgcccggtttggcgatacccatgctgcgctcgccgatcaaggcggcgcgcctggccaggtagtccggtgcgacgaggcccgcgaccggcacggggacgaagtctgcatcagcgacgtagagaccgcgatcagcaaaggccaggcgaccggcttcggccagcaggtgcacggcgtcgggcgttggttcaaggccggcaggcgcggcgctttttaccggtggcatcgctgcgatgtcgtgggcttgcagcgcctgcaaggtgcccaggatctgcgcgatagcgatcccgcccgatgatggcggtggcatgccgcagactttccactgcttgtaatcggtgcacagtggggtgcgctccttggccgtatagcctttgaggtctgcctgggacaggctgcccgcgttgcgatggccttgcaccttgcgtgcgatctcatcggcaatcggcccttggtacagcgcgtccgggccttccttggcgatgcgtttgaacacattggccagcgccgggtttttcaacacggtgccggtggctttcggtgtgccatcggcattcaggaaatacgccgccatatccggtgactgcgggatgttacggtcagccgcgatcaggctgtgcaggcgcggagacatggcaaagccctgctccgccaggcggatcgccggctcgaacagcgtggcccattgcaaccggccggtcttcttgtgcgccatttcgagcgcgcgcagtactccaggcgtaccgactgagcgtccaccaatttgcgcttctggaaacgccatcggcgtgccgtcgcctctgaggaacaaacgctcggtggccccggccggcgcggtttcacggccgtcataggcgtgtacgtttttcccgtcccatagcatgatgaacgcgccgccgccgatgccggaagactgcggttccaccagcgtcaacaccgcctgcatcgcaattgccgcatcgatcgccgtaccacccatgcgcaacatttcgcgcccggcctccgccgccagcgggttggcggccgcggccatatggcgctcggcgtgttgggtggtgaggtcggtgcgatagccggaacccagctccggtgctggtggctgttcgttgatcggggtatgacaggcagccagggtcagggctgcggcaatcatcgacagttgacggcgggaaatcgaaaacacgcgctgaactccgttcattttgagaatgatctgttgtccttggggtagtgcgttttacaggtaaatcgtgccttgcaggtagagcaccgcgtggccggaaatgatcacgcgatcacccttgagctcgcagcgcagttggccacggcgcttgccgccctgttcggcggtcaaccggttcttgcccaggcgctcagcccagaatggcgccaatgaagtgtgggccgaaccggtcaccgggtcctcattcacgcccacattcggcccgaaccagcgggagacaaaatcaaaccgtgcgctcttggctgtcacggcgatgccgcgtttgggcaggcccttgaggcgggcgaaatccggggtcagtgcggcgacttgcgcttcgtcttccagcagtacgatgtagtcatcggtgctgaacatgtcggcctgttcaatgccgagcgcgctcaacatgccagcgggcgattcacagggttgtggttgcttggcggggaagtccatcgccagttcatcaccattgcgcgtcacccgcagctcgccgctgcgtgtggcgaagcgcaatacctctggcgcgtccgtcagttggtgaatcaacacccacgccgccgcaagcgtggcatggccgcacaggtccacttcgacttcgggggtaaaccagcgcaattcatagagttcaccgcgaggtacaaaataggcggtttcagagaggttgttttcggcggcgatggcttgcagttgctcatcgctcagccactcggtaagcgggcagaccgccgccgggttgccgccgaacggggactggctgaaagcgtcgacttggtagatgtccagtttcaccgtggagcactccgtgcatagaagggaggctggacactaacagtgggtcaagggagcgtcaaaatacagatggcgcctttttttgcgcgcaagtgcaccgctcgtaaccgcaatccatcgtcccggcacttttctccaggcataaaaaacggcctacctttcggtaagccgtttttagtacttggtggctacacagggacttgaaccccggaccccagcattatgaatgctatgctctaaccaactgagctatgtagccaagtggcgcgcattattcgcgtagaacggcaatgcgtcaagtatttattttgagtttttatctacgctttcaactgtttaagcgaaattaccggatcgggcgacgagtggttcgcgattcacccgtctgcacagcaagaaaaacctgatcgcgttgggcagatatccctgccgcccaacgcggggggctgatattaagggaacttcgcgttgtgagtggcgcgtttaagctgttcacgcgcccgggagaggcgcgagcgaaccgtgccgatcggaatgtccagtgcgtcggcggtgtcctggtagctgccgtcggtttccagtgaggcgtatagcgtcttgcgcatctctatcggcaggtggtcgatggcgctcaaggttttctccaggcgccgattgatttcaaattcccagtccaagttatggttctcttcctgtccatgccacagcgattcgtcgaattcgcaatgcacgggcttggcgtacagccgcctgaagtggttgcgtatgaggttttgcgcgataccgcacatccaagtgctgagcgtggcattcccgctgaaacgctcacggttgcgccaggcttccaggtacgtcaattgcagcaggtcgtctgcatcttcggggttgagtacgcgcttgtggatgaatctgcgaagttttttttgctggtcatctgtcaggtgaagcatgaattgaggcgagctgccaaccaggtgcgctaaagcttcaatagggatattcatggatttttccttggagtagacacagtcgaaaggtgtcgacgagaaccccgtttgcactggctgtgccaagcggaaaaattttttaatttattgatttatataaataaaaatcttgtattggtgcgattttgtgcaagtgtttgcagagggcgttgcaggcgcatgcaagttttttcaaatgtgcagtgggccgctagctgatggaaccgcttgggttggtcttgccacacaggtagacactcttcctgttcaggtccggccatgattgaattccattccgaactgccaaaaatccacaatgtggatcaaccagctgtcaatcagacttccacacctgctgccaccacaggcccggttaccgataacctggctctgctgttcaacgaggaagtggtcgccaacagccgggcgctgaatcaacggcagctcatcctgcccttggcatcagttcagatgctcaggcagatttataaccaattgggtcatcccgccaagaagaccttggcaatggccaaattgcagctcaagcagctactgcaagtacgtggtgatgttggggagttgcttggggtttgcggaggcgaccccacgctcacgtgtgttgcgctcaagaatttggaggcccaggggggcactgaagcagacttggcgcgcgatgcacgcatcaagctggaggctagtttcgcaggacagatccaggccggtctgaatactgcggctgcacttgaggaggggtgtcccgacctgcaagaacgcctggcggtgcgaatgctctattaccagagtgtggtttcgcaccaatccctggcgacgatgttgcagacgctgttggatgtatacggtgtggaacggtttccagaaggactcaaggtcatgcaaagagccttggcggacgatatcgccgccaaggtgtcttcatcgcccaatgcgtccctgcgtaccttgctcctgggcctgcaaagctgtgggcaactgagcggggtgttggcggcgtgtcaaggactgctccaacgactggctgtcgatcataaagcggtagtcctgctgcagcgacttctggggttcactggcggtggtgttggcgctgcggaaatcctgagatttgtagatgatttgcagggtggttcaactgcgcagcaattgctggtcctcaatgcacttttgccagtggtcgagcaattgccattggctttatggcccgatagtacagtacgtaatgaaaccctgaattgcttccgggtagtgatcggggagctggaccggattgcacgtagccatgcacgttttccacgtgagctggaggcccgggcgtgacgatgctgtcggtcatcaaccgctttctgctcaaggcggcgcagcgcgccgaagtgctgggcgcagtggtggtgatggccatcgtgttcattttcatcgtgccgctgcccacctggctggtggacattctgattgcgctcaacatctgtatttcgtgcctgttgatcgtgttggcgctttacctgccagggccattggcgttctcatcgttcccctcgattctgttgctgaccaccatgttccgtctggcgttgtcgattgcaaccacacgtctgatcctgctggagcaggacgccggcgatatcgtcgaggcgtttggcaatttcgtggtcggcggcaacctggcggtcgggatggtcatcttcctgatcctgacgctggtcaactttctggtcatcaccaaaggctcggagcgggtggccgaggtggcggcacgtttcagcctggatgccatgcccggcaagcaaatgtccatcgacagcgacttgcgtgccggcctcattgacggcatgcaggcaagggacaagcgagaccagttgtcccgcgagagtcaattgttcggggccatggacggtgcgatgaagttcgtcaagggcgatgctgtcgccggcttgattatcgtcgtggtcaacctgttgggaggcttcgccacgggcatgttccagcatggcttgagtgcttccgactctatcagcctgtactcggtgctgaccatcggcgacggcctgatcgcgcagatcccggcgctgctgatttctctcaccgccggcatgatcatcacccgtgtggcgccggatgggcgcaggggcatcacgaatatgggcgccgaaattgcccggcagatgaccagcgaacccaagagctggatgatcgcttcggtagggatgctggcctttgccgcggtgcctggcatgcctaccgtggtgtttatcctgatagcgctggtcactggtagcctggggtatttcctgatgcgccagcgccaacggcaggaacaacccactgctgaagccgcagaggcggtgcgccccgaagagaacggtcgtgaggacttgcgtgggtttgatccttcaaggccgtacctgctgcagttctctccggtgctgcgtgggacgcccgaggtgaccgatcttattcacgcgattcgccaggcgcgaaatgcgctggtcgccaatattggcctgacattgccaccgttcgaggtggaactcgatgacacgctggccgacgatgaaatgcgtttttgtgtgcacgaagtgccgatggtcaaggcctcggtcgtcagcctggttgcggttgagcgcaaggcgctcacggtcgaacccgcgcacgccataccggggctggcggagcgcgatgaacaggagtggctctggttggcgccggatgatccgctgctcgatgatccgcagttggagcgcttcaccgcggcgagcctgatcgtcgagcgcatgaagcaggcgatgatgcgaagcgggccgcagttcctggggatccaggagagcaagtcgatcctcagttggctggagcacaaccaaccggaattggtccaggaactgcagcggatcatgccgctgtcgcggttttcggcggtgttgcaacgcctggccagcgaaggtgtgccgttgcgggcggtacggctgattgtcgaatcactgatcgagtacggccagcatgagcgtgaaccggacgcactggctgactacgcgcgtattgcgctcaaggcacagatctaccatcagtaccgcgaagccgacggcctgcaggcctggctgctgtcgccgcagaccgaaaacatcttgcgtgatgcattgcgccagacccagaccggcgtgttcttcgccctcgacgaagagcatagcgcggcgttgatcaacctgctcaatcaagccttttgcgcacgcccgaaattcaagagcgtgatgctggttgcgcaagatttgcgcagccctttgcgcacgttgttggtggaagagttcaaccatgtgccggtgctgtctttcgctgagctgggcagtacttccaaggtcaaggtgttgggccgttttgacctgggccaggatgagctgatgcgcggtgcagtggcgtgagggcttgatgatgttcgagttacgcgtgcttgacgggctgcaccagggtgctgcgttgccgttgtttggggagcagtggaccatcggtgcccacagcgatgcagacctggtgctgagtgatcctggcattgccgagcggcatgcatgtctgtggctcatcgacggcgtttggtcggtgcaggccgaagctgggttgttacgcggggctgacggtcaggtgctggctcagatcgcgcgtctggcgctcaatggtgtgttttcggtgggaaacgtacggctgtgtgtcagcctggctgatgagccctggcctcaagcgcctgcgcctgcggcgccgcccgtgttcaatgaggcggcacggacacttaagttgtcgactatctcccactcccagcagaagcgcttgatcagcctggtgctggcgataacggtcatctttatcgtggtgggtatggcgtctacgggcgagcctgaggccaaggcttccttgatgccgcctgtggtgcgcaagcacgagttggcttcaccgttcgaggtgcgtcagcagctgttgaagatgctcaatgagcgcgagttgagccagcgcgtcaacttgcaggtgatcaatgggcaggtcgccctcgatggtgatgtgtcccaggatgatgtagagctggtcgcacgcatgctcaatcgtttcggcgagcaatttgacagcgcggtcccggtgatcagccgtgtgcgcgtgcgcgacgcaaccttgccgttcaagattgtgcagatcgtgggtgggcccaacggtcatgtagtcctggaggagggcggccggctgtttgttggcgatgaagtggagggtttgcgcctggtgctgatcgacaacagcaaagtggtgttcgatggcgtgcagcagtatgaggtgcgctggtgagcgtggaagtgcaggcacgcctcgaggcctggcagcagcgtcaggctcagtcgctggctaccttcgcgcctgtgacgatgcgggggcgcatccagcgcgtcaatggcatgttgttgcagtgccgactgccccaggcgcgtatcggggatctgtgccaggtagagaaaaagccgggcgactacatgctcgccgagatcatcggttttgatcagcaggatgccgtgctcagtgccctgggcaaccttgaaggcgtgcaggtaggcgccggcgtggagcgcctgggtgtttcgcatcgggtccaggtcagcgaggcactcctggggcaggtgctggatggtttcggacgaccgatcaccggtgatggccccagcgcctttgtcgaagccgacttgccggataccagcgcggtattgtgtgaggctcctttacccaccgagcggccacgcatcaaccgtgcattggccaccggggtgcgttcgatcgatggcctgctgacgcttggtgaaggccaacgcgtagggctgttcgctggcgcggggtgcggtaagaccaccctgctggcggagattgcccgtaacgtggagtgcgacgtcatcgtgttcggcctgatcggcgagcggggtcgcgaactgcgcgaatttctcgatcatgaactcgatgagcaactgcgctccaaagcggtattggtgtgtgccacctccgatcgctccagcatggaacgtgcacgtgcggcgttcacggccaccgcattggcagaaggcttccggcgcaaggggcagcgtgtgctgctgctgatcgactccctgacacgtttcgccagggcccagcgtgagatcggcctggctgccggcgaacccctcggccgcggcggcctgccgccatcggtctacagcctgctgccgcggctggtcgagcgtgccggcctgacccgtgagggcgtaatcacggcgatctatacggtgctgatcgagcaggactccatgagcgatccggtagccgatgaagttcgctcgttgctcgacggccatatcgtactgtcccgtaagttggccgaacgtggccattatcctgcggtggatgtgctggcgagcctttcacggatcttgagtaatgttgtcgagcctgcggatatccaggcgggtacagcgctgcgtcgcttgttgtcggcctaccagcagatcgagttgatgctcaagctgggggagtatcagcctgggagcgatgccttgaccgacctggcagtggacagtcgccaggctgtcgatggtttcttgcgccaggacttgcgtgaacccacacccatggcggcaacgcttgctcaactcaaggagctgacggcctatgtcccattctgatgtgctgctcagtgaagtcgagacgctgcgccgcctgcgccgtcaccgggcagaccgcgccgagcgcgccctgcgtgaagccaagcgagcccagcaggccctgcttgcgcatatccagcaggcccaggatgcacttgagcaaacccggcaggaggaggccgtgcaaagtgctcagttgctcagccaacaccaggggcaggtattgactcggcaggctctcaaatcctgggcggcgcaggagcgctcgttatctgccaatacacgtcgagacatagggcagttggaggccttgcagggccagcgtgacgctcagcaaacccgtgtcggcagcgcccagaagcaggtgaccgagtgcctgcggcaggtcgaaaaacttcaggagttgtcccttttattggtacaggagccgacatgacccaggttgcagataaacccgctgagcgtccacgcgtacgtgaacatcgagaggagcgcgagccgggaactcgtggtgttgtgcctgcggaattgacccggttgttcagccagttgtgggccggtgacggcaagggttctggctctggcacttccctgtcgggtgcgaaatcctcgggcagtgccgtgatgatcgaggcgcttgccgaacaactggttccgcgtctccaggccgcttcgcagtggccgcttcaggccgtgttgtacctgccgcgtctggggcggatcaatgccagtgtgcatcgcgaacagaacagctggagtatcgatctggacgcgcaagaggaggcgacggcgcgctggctcagtggcgtgcggcgacagtgtgaggatcggattgcgctgacgctggggcagccggtcagcctgtttctgcctaatgtcggcagcgcatgatagtgccgctgctgacattgccttctatcaagggcgacaccgctgccgcgcgacgccggctgggacgcggtttgggcctggcgtttgaagtggccgggcaagccggtcagttgcggctcgaacctggacgtgcccccgcaggtggccaggcgatgtgcttcgaaacggggtgtggcgtgctggccctcgccgaagcagggccgctgctcagcctgctgggtgaatgcccggtgacgttggccccctccggcaacgatccggattcctggttttgggcgctgttccagtttcacctgagccctcaggtgaaagccctgttgggctatgtgcgattgctggataccgaacggcccaaggcgtttggctgccggctaagtgtggccctggggaaaacccgggtcgaagggtatgtgtggctgaagcccgagagctttctggcgttgtgcgatgccggcccctggcgtgccacggccaggccgatgcccgcgtcgtttcagttggccattgccgtgaccctcggacatttgcagttgccgattgcgcaagcacgcagcctgcggaccggggatgtgctgctgcttgagaggatctttttcctagcccagggcagcggccatttgcaggttggcaaacggcgactgaatggctgcattgatgataacaacgggtcgttgtgcctgaccctgacttcaattgaggagacttctgtggatgaagaattcatagcccccgactatgccggtgatgagggcgacgagccagtgatggacgtattcggtcacgaaccgttcgatgaattgagcatggggctgaacgtacgctgcggcacgttgaacctgaccctgggcgagttgcgtaacctcgcgccgggcgcggtgctgggcattggcggttatgcgccaggcatggcaggcctctattacggcgaccggccgattggccagggacagttggtggaagtcgatggacgcctgggattgcagttatcccgcgtgatgtttggccgatgatacttcaggggttggaccccttagtcctggcggtgtttcttgcggcattatcgttgatgcccatgttgctggtggtgtgtacggcgttcttgaagattgtgattgtgctgatgatcacacgtaacgctatcggtgtgcagcaggtgccaccgagcatggccatcaatggcatcgcgctggccgtcacgctgtttatcatggccccagtcgggtatcagatcgctgaaagcgtcaaagtctccccccttgatctgagcaatgtgcaaacgctcctacagacgggaagcgaagccatcaaaccgttgcgtgccttcatgctgcgcaacatcgacccggatgtgctcacgcatctgctggacaacaccgcacgcctttggccggcgcagatggcccatgaggtgcagcgcgaagacttgatcctgttgattccggcattcgtgctgtcgcaactgcaggcagggttcgagatcggtttcctgatctatatccccttcatcgtgatcgacctgattgtttccaatctgctgttggcgctgggtatgcaaatggtctcgccgatgaccatttccctgccgctcaaattactgttgttcgtgatggtgtctggttggtcgcgtttgctcgacagtctgttcctctcctatctctgagtggcttatggaacccatcgtactgttcaagcaaggcatgttgttggtggttgtgctgtcggcaccgccattgatcgtggcggtagtcgtgggcgtgatgacgtccctggtgcaggcgctgatgcaggtgcaagaccagacgctgcctttcggcatcaagctggtggcggtaggtatcacgttgatcatgaccggccgctggattggcgtggagttgattcaactgatcaacctcacctttgacatgatcggccgatcggccctgaactgaggccctgcctgtgctggtttatctcgagtatctacccagcctggtgattggcatggcgcgtatctacccttgtggaatcctggtggcagccttctgttttcagcatattcggggcatgccacggcataccatcgtgatggtcctggccttgctgcctgcaccgggtattcatgcggcgttggtcggccaggactactcggcgatgctgcttggggtgttggtgctcaaggaggtgggcctggggattttactgggcgtgctgctttcgatgccgttctggatgttcgagtcggtgggggcgctgctggacaaccagcgcggcgccttggcgggtggccagctcaacccttcgttggggccggatgcgacaccgatcgggcatttgttcaagcagctggcaattttcctgctgatggtcagcctggggttggggacgttgacccaagtgatctgggacagttatttgatctggccgcccacagtgtggtttccggtgccggccattaacggcatgagcgtgtttatcgacctgttgggggagacgttcacgcacatgatgctctacgccgcgccgtttattgcagtgttgctgttgctggagttcggcatcgcactgctgggggtctacagccagcagttacaagtgagcacgctggcgccaccagtcaagagcctggcggggatcggcatcctcttgctctacttcacgttgctgcaggacctgattgtcgggcgtatggggctattgggtgaccttaaacaatcgctgaggttgttgatcaaggtcgctatcccatgagtgactccggcgaaaaaaagcacccggcgtcagccaagaagctgcgggatcaacgcaagaaaggccaagtcgcccaaagccaggatgtggcaaagctggtggcgcttacggccatcagcgaaattgccttgttcactgccgagagcagcctgcaacgcttccaacaattgatgctgctgccgatgtcgcgcctgacccagccctttgcgcgagcgttggaggaagtactgtttgaaggcatggtggtgtttttctcattcgccctgttgatggccggggtggcgattgccgccaagctgatcagcagttggatgcagttcgggttgctgtttgcaccggagaccctgaagctggatttcaatcgcctcaacccgatcagccaaatcaagcaaatgttctcggcccagcagttgatgaacttgttgatgagtgtcgcaaaagcctgcctgattgcgttgattctgtatgtggtgatctggccctcattgggtacgttagtcaatttggccaccagtgatctgcagagttatatcctggcgttgatcgctttgtttcgccacttgctgcatgtctgtctcggcatgctgctggtgctggcgctcatcgacctgatcatggcgaagcacttttttgccaaacgcatgcgcatgacccaggtggaggtcgttaaagagtacaaagacatggaaggcgacccccatgtaaagggccagcggcgcgcactggcgcaacaattggcccaggaggagccgaaggtcaagctgcccaagctggaagaggccgatatgctggtggtcaacccgacgcactttgctgtggccttgtactaccgccccggtaaaacgccgctgcccttgctggtcagcaaaggcatggatgccgaagcccgtaaactgatccatcgcgccaaggtcgccgacgtaccggtaatccagtgcgtgtggctggcccgtacgctctacacaaggcagctgggtaccagtatcccccgcgaaaccctgcaggcggttgcagtgatttaccgcaccttgcgcgagctcgatgatgaagccaagcgcgaaaccctggagttgccggaacttgagcaacgttgatcagcggtttctacctgcgtccaaggcttgcagattggccagcgacagcagacggctgaggaccctgtccacagcactgtgggctgcgggcagagcgtgccaaatcaccagagcatcctggtcgtcgacgtagataaaacaaccatcgaacgccagcgcctgctcaaatcgccgttctaacacccgctgcaattgcccggcctgcactgcttcgcgagcgatcttcagtgccagtccctggcggtttccagcccgcagtgcgcaagcgctgataccgggtgccagggacaggtgagcatcggtgccgctcaccaggctgctcagaaatacctggcgttgatcgtcgggcattggctggtgcttcatcgttcaagcgaaatcgtctggtagtccgcgcgctcgccggaggggccgggttcgactcgcattgatgagggccaccagatgaccatcttgtctttggtcgattgtgggcgtgagcacgaatcacctttgcaggtaggagtacatccgctgacgagcaaggctgcactgatcaggatgatacgtaacggtctgtatttcatggcgtggccttttgagcaggtgtgatcaaggagggacggggcacgctgaggtgtgcatccttcactactgggcgcatggcgataaacacctcggtttcctcacctggcttgagccaggcgcgcggccacacggtgactgccagggtctgcgagttactgcactccttttcgtcgatacgtacgttgcgtttgaactggttgcgtaacaccacgaccgctacgttgtattctgggcccgcgtaccactggctacgttcggtattcagcgccaggaggtcacgggtgttgcataaggtgttcagtcccagtggcatcggcgccgcgttgaacgccttgggcacttccccgctgaccagatgcgccagggtagaaatgatgtcactgcgcttgatgaccggctgatggggagccaggcgtttggccaacggagcgagggcggcctgcaattcggcttggtcggcttgtggcaagtagcgcgacgggtcgtcctggtccccgatgacgcgtggggtgaggatgaacaggcgttcacggcgattgctatggcgttctatcgatgaaaacagtgccttgcccaaaagcggaatatctccgagcaacggtatcttgctgtgcttgtcggtgttgtcggtgacatggaaaccgccgacgaccagcgaacgtttttcctccatgactgcctgggtactgaccttgccccggcgcacatcagggtggttgggcgttgggttggtctcgtcgaaactgccatcttcgatgtcgaccgccaaatggatccggtgagcgccccggccggtggtgacccgaggtatgacttgaaggctggtgcccacggtgaccggcaaagtggttgcgaaatctccactggtggtgatgtattgggtgcggttgaagtcgatcaccgccggttggttctccagggtgagcaccgaggggtttgagaccatggttgccagtcccttttcttccagcgcgcgtatgtcggcgtagaagcgatcgcgatgttcaatccacagctgcgacgaagtcccgggtgccatgttgacgccaccccggaagcggctgttctggaaaccccaattcacgccgaattcacgcagttgtgtacgctcgatgtcgagaatgatcgcatcgatttctatcagcttgcgtgcgacatcgagttgagtgatcaactcgcggtacatggcctgacgttcgggcaggtcatagatcagcacggcgttgttgcgcacatcggcttcgacacggattcgtccggcagataccggcgcgcgcggggtcaccgccggccctgcgtccacctgccctgtgttggcgtgtgcaccgagcatttggcccagcagcgggttgcccaaccgtggcacattgggtgtgaggggggccggttgggatgttgggcgttgagacagtcctgtaagcgtcgaggcggagcgcggttccagcaggccacgtaaaatgctggcgacgccgggcacgttgagcttctcgccgcgataatccacctggcggtctgccgcattggcaaacttcaacgggtaactgagcacgctctgtttttcatctgcagagcgacgctggctgctgaattgcttgatctgttctatgtagcgcttggggccggagacgagtaccacaccgtcttccggcaactcgccccagccaaagcggctatcgagcaggccgatatcggtcagggcctgcttgaggtccgctatcgtctctgaagagacctccaggcgcgcggactcctgttggtcaagcgtgctgacgaatagggtgttgttgtagagataccattgaaaacgatgctcgacgcccagtctgtccagcagagactggggggtattcgcgcggatcttaccgttgacgttgccttccagcaggccctcgatttgcagttgggtgccaaaggtctgagcgaagtcttcgagtacttcgcgcagcggtttgtgttcggcctcgtaggcgtacgcggtgtttttccattcgggggggatggcggccaaggtgtttcctgctggaatcagcaaccaggaaagcagcaccagatttcgccaatgaggtcttttgggcgagtcgtcaggcgaagcaaggcgcaaaaaagtgcgcttgtggttcttgttatgcattgtcggctctctggttagtacgacagtgaacgtagtgaggtgggtcttaggttccggggctggtgagcaaagcgtgcacacgcagcgcgccaggtatcgcgttggttgagcagggcttcgaggcaaacgagcacgcacgcctctctttgttcgccttgcaggctttgaatcagccaaagcgcaccgttgtcggcttttcgggcaagtgcgccttggaaatgattcaggctgacgaagcccaggcgcatccaccgctgcaaggctgtgttatctgagcaggtcgacgtcagttgagcggcgagtaataaagacccactctggcgttttaatacgattgggtcatcgccttcatagaaggttgtctgttcatcgcggctgtttaaccagtcactgactatcgcctgcatattattgaaaactctcaaaacaattcttgagcagcaggtgattaactcgattgtgttccagataggacatttgagttgtcattttctttacggccagttcaaagaacagatcggcgtcggcatcgtctgcctgggtggcgagagacgttgatttgaatgtgttgtgcgcgcgcttgctattgttcagaagttgacgtggtagatcgctgaaaaagtccatgggtatttcctttttgtttgccgggatagtgagtgaacactggattttttcccggtgcggagggcaaatggcaaagtcggtagcgttagatgtttatccggtactcgttgctgtgaataaaaaaggtatcgagcattgagcgccaactgatacgaaagtctccttcgtcggttttcaatacgagtgtctgagaaggagtggaaccgtcagcatgaagtttccagaacatcggcttgtgagtggccagacactgttttatttcctcaaaatcattggggtgacataacagggctgcttcgatctctgggacttgattggccatcaattgcttcagcatggctgcaagccttttgggagctaccgtctcgtcgagcacacagcgaattgcctgattggtgatggacgtcgcgtactgttccaggttgtcgagcattgcttggcggtcgcgctcccagcgcttgaattgcgtgtctgcgcgctgccagatctcaagtgatgaggtttccagaagcgcttcgcattttttttctgcctggcgtatcagttcagcggctttagtatgggcgcggttcaagagctcttctgcttgctcccagttcgcaagttcttcccggggtatcagattgcctcgcaacccgggtgtgtccttgaacaactcaagggtgtatcggcataacatcgctggtctcctcaccattggagtcaggaagcgtggggtcgtccgcccaggttgtaatgcgccagactatggcttgccataacgtgttcagccgactgtttacatgctcgaatgaggtgttattttcctctaccctctgcacgcgctcacgggaaaaacgcaatctaagacgctgccaggtagtgggttccacccagctatggagcagttgcagcgggtccaggctcggcaacaacaggtctggcgggagagccttggatagacgcatgcaccacaggtgatggctatcgctcaacggcattgccggctcagtgcagaaggttcgctgaaccagcgtgagtgccaggctcagttgttcctcggaggccagggccaggtgcaataccgtggaggggggcgtgggaggcaggcaggctgtcactcccatgaagtcgcgtggcgtccatcgcctgcttcgataaagcgcgtcaaccgccctgtactcatcacccttccagtcgtcgtgcgcgtgcctccaagggaatgcccaccatttagcccaagccaggtgttcagcgatggaggggtacggactaggcatcatgagccggaccgactgattcacctgctacgggcgagccttgtaggagctttttacgtcgattgtgcaggaccagtgcggcgactaccgctgccaccataccgagcagtgacgcgataacgctgcttcgccaaaaggcgagattctcgctgggcaccaggaacggaccgaagtacaccaggcgttgctgttcctgataggtagtggcaggtacgaagatcacggtaagtttttgcaggttgtccactgcagtggtcatgcctgggatgctgcttgccaccattctgcgaacgcgcgcgcggatgttatcggggtctaggcgcggatcgtgcttgatgaataccgaagcggatgccggttggacaggttctcctggagcgatgcgttcgggcaatactacgtgcacacgtgcaacgataaccccgtcaattttggataaggtcgcttcaagctcctgagataaggcatagatatagcgtgctcgctcttccagaggtgtggaaataaccccttccttgcgaaatgtatcgcctagcgaagttcgagccaccctgggtaaaccagcggcttccagcgtgcgtactgcacgtccgatgtcggttgcttctaccgctacgacgacaccatcttttgccgggattttttgggcgcgaatatgtttgtctgccaattcagcgaccacctcattggcttcttgctcagagagttggcgatgaagttctacgcggtcaccgcaaccgcttaacagaaagatagccgtgagaaatagagcggccggtagaatgttattcatgatgactattgcaagttacagattttgtcgatgcattgagttgccttgccaaggctttttaccatcagttgtgaggtgataacggcacctgataattcgcgtgggtattcgttgaatgcagtcatgtctgtgctgttacttgatgatttcagcgctcgcgccatgcgattttctttggctttaagcagttccgatagctctgccagtatggtaagtgtggtacctgaatctgtaggagcgcgcgccgacgttgaaggagcgagcatagcgctgaaaaaagtggcgtctgtgttgaaggccgaatgttctcgcgtgtcacgggagtcttcggagcggtggtgttgcgttaagagtgcatattcttctatctgcatgtgaggccttcaaggtgggagagctaaagcagatgctgaatgtttgtggatgccatgattgttgtaatttatatagcggcctccccggcagtcgagccggggaggttattgcgttatcgcacttctttacctgcggagtacgcgtttgtaatggtcttcgcttgcaggctctgctgaaaacctttctcggcgactgcggctgctcgcgcgatctggtcatcgctgcctggggatacttcattgcccgataacatatctttgagctgttgaaatattgcgttgttgttgctaccagatatactagaaatactcataataaactccaagttcatctatagggtttgatttactcgcctcggatcaagacacacagcgggtctgcaaggctgataaacttaatccaagctatgactgtgtggcgagcgtgtatgaaacgttccggatattttcgagagcatatgtttctatatgttttccaatgaataggtttttgccagtgatatgtccagttgtttcattcggtagtacagcgtgcgctttgcaaggcctagttctacggccgcggtgtctacacaatggcggtggcgatgcagcgactcctctatcaaagctttttcaatttgttgcaggcgaactttaaggcttacttgggtttctcgctggctgtctccggggggggagagcggtgacaagcccagcacaaagcgttttgctgtcgaccggagctcacgaatattcccgcgccacgagtgactgagcagttgttgcagtaacccgcctgaagggggcggggctgtgcatttgaagtggtcggcttcctgctggaccatttccaggaacaacggaatgatgtgctcacgtcgatcgcgtaatggcggcagctggatgttcacgacattcaggcggaaataaagatcacgtctaaaggtgccccgttcgaccatctggtggagagaagcttgggcagacgcgatgacacgcatgtccacagggatgaaacgggttgagcccaggcgctctactccacgcgactccagaacgcgcagcagtttggcttgcaggcccaatggcatgctatcgatctcatcaaggtagagcgtgcccaggtgggctgcctcaatgaagcctgccctggattgcatcgctccggtataggcaccactgttgacgccgaacaattggctttccgcaaggctttccgggatggccgcacagttcacggcaacaaagttgcctcggcgtcccgataagcgatgaattcgctctgccaaggtatccttgccggtaccggtttctcccagtaacagcaggtcaatattgagggtcgccgtgctgttaagtgtctgttcaatgtccgggccttcgatgagtgacgttgccgtttcattttctttgttgaaggcagccgacattgaatgatgctccgtgctcgctattaagccattgtcaaaaatacggtatgtagatgctgactagtaacgcctagggtatagaagttttcatcctttcttaaggtgggaagggggaaagtcttgtggggaagtgtctctttgttgtggcgataaagtaactattttgaacttgagctcgaggggggtaggagaagtctgaaattatttaatattttgatgtgagtagtcacttgttgagcattaaacagtcacgcataaaaaaagccgatgcagagcatcagcttttttatctgtagcttaaatggcgagtgatgattacacgttaaaccggaaatgcatcacatcgccatcttttacaatgtattccttaccttccaaacgccacttgcccgcttccttggcaccggcctcacccttgaactggatgaagtcgttgtaggcaatcacttcggcgcggataaaccctttttcgaagtccgtgtggatcaccccagcagcctgtggtgcggtagcaccgaccttgacggtccacgcacggacttcttcgacaccggcggtgaagtaggtctgcaggttgagcatttcataaccggcgcggatcacacggttcaggccaggttcttccaggcccagggcctcgaggaacatgtctttttcttcaccgtcatccagctcggcgatttccgcttcgatcttgttgcacaccggcaccacgatggcgccttcttcgtcggcgatggccttgaccacgtccagcagtgggttgttctcgaaaccgtcttcagcgacgttggcgatgtacatcaccggcttggtggtcagcaggtggaaacccttgatcacggccttctcatcggcgcccatgttcttcatcaggctgcgtgccggcttgccttcggtgaagtgagcaatcaactgctccagcaggcctttctggacgactgcgtccttgtcgccgcccttggcgttacgtgcgactttctgcagttgcttctcgcagctgtcgaggtcggcgaagatcagttccaggtcgatgatctcgatgtcgcgtttcgggtcgacgctgttggatacgtggattacgttctcgtcttcaaagcagcggaccacgtgagcgatggcatcggtctcacggatgttggccaggaacttgttgcccaggccttcacccttcgacgcaccggcgaccaggccggcgatgtcgacgaactccatggtggtcggcaggatgcgcttgggattgacgatggccgccagggcgtccaagcgtggatccggcatcggcacgataccgctgttgggctcgatggtgcagaaggggaagttctccgccgcaataccggatttggtcagggcgttgaacagggtggatttgccgacgttgggcaggccgacgatgccgcaattgaatcccatggtgtttcccctcggtaagagtcaggccttctggctgtgcaggtttttcatcgcgcggttccattcaccggcgaagatatccggcagcacgccgagggcaaagtcgatgctggcatcgagtttttcctgttcggcgcgtggcgcacgacccaggacgaaatttgaaaccatactggcaacgcctgggtggccaatgccgagccgcagacggtagaaattattctgattacccaactgcgcgatgatgtcgcgcaggccgttgtgcccgccatgcccgccgcccagcttgagcttggcaacaccgggtggcaggtccagttcgtcatgggccaccaggatttcctcgggtttgatccggaagaaacccgcaagcgccgcgacagcctggccgctgcggttcatgtaggtggtgggaatcagcagacgaacatcctgaccctggtgcgaaaagcgcccggtcaggccgaaatgtttgcgatcggccaccaggttcacaccttgggcgtgggcgatgcgctcaacaaaaagggcccccgcgttatgccgggtctgttcgtattcggcgcctggatttcccaggccaacgatcagtttaatggcagtcacgacaggggcccttcctttggagttgtggataacatcgccagacctgagtgcggcgaaagtggacgacactacatcatttactcaagagtaaacgccgcgttatcgcccgctttctcgctacgtttcggtccgcgatgtttcctcaagctccggcaatgcagagtgaattactctgcagcgccttcttcagcttctggagcaacgcgtggagcgtgaacgttggcaactgctttgtcatcaccgtgagccagtgcgacaaactcaacgcctttaggggccttgaggtcggacaggtgaacgatagcgccgatttccagagccgacaggtcgacttcgatgaactcaggcaggtctttcggcaggcaggtcacttcgatttcgttcagtacgtgcgagatctcgccgcctttcttgaccggagcgtcttcaccaacaaagtgcacaggcacgatagcggtcagtttctggccagctacaacgcgaacgaagtcggcgtgcatgatgaactgcttggacgggtgacgctgcatcgctttaacgatgacgttctgcttggcgccgtcgacgttcagctcgataacgtggctgtaggcagcttcgttttcgaacagcttggcgatttccttggccaggatggtcacggattcagcaggcttgttaccaccgtatacaacggctgggatgttggcggcgtgacgcaggcggcggctcgcacctttccccaggtcagtacgcgcttgggcgttcagagtaaagtcagtcattttgtatctccaaaatagccatcatcgagcggcgtttgcgaccagcgccggcctcgacatgggcaaaaaagccccgccccaacagaatgtcggggcggggcgcttttcgtcagtggaatgtaccgaaggtttgacccttagcggaacatcgcgctgatcgattcttcattgctgatacggcgaaccgcctcggcaactaccggtgcgatatccagttgacggatacgcgaacaggcttgagcagcagcggacaacgggatggtgttggtcaccaccagttcgtccagcatggaattctcgatgttctcgatcgctcggcccgacagcacagggtgtgtgcagtaggcgaagactttagcggcaccgtgctctttcaaggctttcgccgcgtggcacagggtgccggcggtgtcgaccatgtcatcaaccagaatacaggtacgcccttcgacatcaccgatgatatgcatcacttcagagtgattggctttctcgcggcgtttgtcgatgatcccgaggtccacgcccagggatttggcaacggctcgtgcacgcacgacgccaccaatgtccggggacacgatcatcaggttttcaaagcgctggtcttcgatgtcatccaccaatacgggggagccgtagatgttatctaccggaatatcgaagaacccctggatttggtcagcgtgcaggtcaaccgtgagaacacggtcgatacctaccacggtcagcatgtcagcaacgactttcgcgctgatggccacacgtgcggagcgcggacggcgatcctgacgggcataaccaaagtaagggattacagctgtgattcgagtcgctgaggagcggcggaaggcatcagccatcacgacgagttccatcaggttatcgttggtcggagcgcaggtcggctgaataatgaacacgtctttaccgcggacgttttcattgatctcggctgtaatttcgccgtcggagaatttaccgacagagatgtcaccgagagggatatgcagctgacgtacgacacgtcgagccagatcggggttggcgttccccgtaaagaccatcatcttggacacgcgcagtacctagaggctgagggtaacctggatgagtataggaaaatggcaggggcggctggattcgaaccaacgcatggcaggatcaaaacctgctgccttaccgcttggcgacgcccctgtatctgttgcaacgagtgcctaacactcggttcctttagagcagactttgcaacttgcgatgcaacatcgaaacgttgcttccctttgctacaaaccctgtaagggtctctgtaagaagggccgagactttatcagcttcagctttgcttgggaagcccccaaacacacaacttccagttccggttaattttgcttcggtaaatttacctaacaaattcaaagcgttacgtacctctggataacgccttgctacaaccggtaagcagtcatttcgactgtttcccttgggaacggggcgcactttaatgggagaagagttacgtgtcaacaacggatctgaaaaaatttctgctgtacttacagatacttgcggcacaagcacgacataccacggctcttcggggtattccggggtgagtttctcccccacgccctcggcgaaagccgcgtgcccacgcacgaaaaccgggacgtcggcgcccagtgtcaggcccagtgtggccagccgatcatggtcccaacccagttgccacaagtgattcaggcccagcagagttgtcgcggcattcgagctgccgccgccgatgccaccgcccatgggcaggattttatcgatccagatatcgatgccgagcgcgcaaccggattgctcctgaagtttttttgcggccttcacgatcaggttactgtcgtgaggcacgccttcgaattcggtatgcagcttgatcacgccatcgtcgcgtacagcgaaggtcagctcgtcgccgtagtcgaggaattgaaacagcgtctgcagttcgtgatagccgtcttcacggcgaccgagaatgtgcagcatcaggttgagcttggccggggagggcagggtcaatgtttgtacggacacgttattgccccagcttgcgtggttgccagtccttgatcaccagtgtgacgtcaaggtcgggaccatgcagcttgatgcgctctggcaaccaatagccgctttgctctacgtagctcaaatactcgacctgccaaccatcctgctccaggctggccaggcggctgtcgccgttgaggctcaggcgactcttgctgtcaggtgcgggcaaaccgcgtacccaccacaccaggtgagacaccggcagcttccagccgatctgttgttccagcaattcttccggagaagccgcttcgtagcggccctggttggccacttcaaggctgacttgccccggccggccggtcaggcgtgcggcgccacggcccagcgggccagacaggcgaatatcgtagtagtcctggcgttgcagccagaacaaggtgccgctgccggagtctttcggcgcgcgaacccccactttgccttcgatctgccagccatcgatgctgctgagctggtccttgtgctgcttccattgcgccgggttgccctggccttcaacggattcacggctgccgatgcccgcgcaaccggcgagcagggctatgaggctgaaaataacaacgtggcgcaagaacataagcttaaagagtctcggatccggtcaggcgcttgatggtgccgcgcaggatagggctttcgggttgttccttgaggaatttttcccagatctggcgtgcttcgcgctgtttgccattggcccacagcacttcgcccaagtgggcggcgacttcctggtcggggaagcgctccagcgcctggcgcagcaagcgttcggcctcatccaggttgcccaggcggtaattcacccagcccaggctgtcgagcacggccgggtcctccgggttgagcttgtgggcttgctcgatcagcaccttggcttcgtcgtagcgcgtggtgcggtcggacaaggtgtagcccagggcgtttagggccatggcgttgtccggatcgcgcttgatgatcaggcgcaggtctttttccatctgcgccaggtcattgcgtttttccgcctgcatggcgcgggtgtacagcaggttcaaatcatccgggaattgcagcaaggcttgttgcagcagcttccaggcgcgctcgccctggttgttggccgacagggtttcggcctggatcaggtagagctggatcgcgtaatccggttcggcatcccgcgcggcggccaggcgtttctccgcctcgtcggtgcggccgttgctcatcaggatgtcggcctggcgcaattgggcgggcaggtagtcgttgccggggccgacctgggcatattcgagcagggcggcttgcggatcgttgcgctcttcggcgatacggccgaggttcaggtgcgccgaatccacatggctttcacgttggatcagctcctccaggtaacccttggcctcgtcccaggccttggcttccaggcacaccagtgccagggaataacgcaattcgtcgtcgtccgggtattgctggaccaggttggcgaactgcactttggcgtcctccatgcggtcctgttccaccagcatgcgtgcgtaagtcaggcgcaggcgcttgtcgtccggatacttcttgaggcttttttccagcagcggaatcgcttccttgccgcgattgaggttctgcagcaggcgtgcgcgcagcaggatcggcgcgatttcgccttcttccggcggattctgctccagcagcttcagggccgcatcggcttcatcatcctgttgcagcagtaacgccttgccaaaaatcaactggctgttcttcgggtgcttttgcagcaggcggtcgaaactcttcatcaggccattgcgcgtgtcctggtcggtgtcggcagccgacagcgcgaggaagtcgaaatgggtgtcgcccttgccctgcaggactttctccatatagaccatggagtcgtcatagcgcccggcgcgtgccaactgaatggctgccgcccgctgtgcttccaggtcgtccggagcgtttttcgcccagatcagcgaggagtccagcgcagcctgatcggcccccaggtactcggcgatgcggaaggcccgctcggaaattcccggatcctgggtgttgatggcctgggtcacgtagttatccagcgcaatatcgaagcgattgcgctggccggccagttccgcggtcagcaggctgtacaccgtttcttcggtgaacgaggaataaaccttgggcttttcaggggcgggagtggtgtcttccaccggcggcgtaccgtccggcgacacgggggccatggcctggcagccgctgagaaagacaaaggcgaggagcaacgcggaagatctattcatataggaagaggacgactaacctgcggtcggatcatcatgacacaagccttcggccaaacataaccgagtctcagttgatgcctttatagacacaaggcattaggacaatagacgacggtggttgttctgaatctttcgaagtaggacaattgtcggcttcccgacatcatcagcgatattgaatggccttcctcgcactcggtattaaccacaagactgcctccgtagacgtgcgcgagcgcgtggcgtttacgcctgagcagttggttgaggccttgcagcagctctgccggctcaccgacagccgcgaagctgcgatcctttcgacctgcaatcgcagcgagctttatatagagcaggagcatctttcagcggatgtcgtactgcgctggctggccgattaccatcatttggacctcgatgaccttcgcgccagcgcttatgtgcacgaagaggatgcggcagttcgtcacatgatgcgtgtggcggccggcctcgattcgctggtgttgggcgagccgcagattctgggccagatgaagtccgcctacgccgtggcgcgtgaagccggcaccgtcggcccgctgctggggcgcctgttccaggccaccttcaattccgccaagcaggtgcgcaccgacaccgccatcggtgaaaacccggtgtccgtggcgtttgccgccgtaagcctggccaaacagattttcagtgacttgcaacgcagccaggcgctgctgatcggcgctggcgagaccatcaccctggttgcccgccatctgcatgacctgggcgtgaagcgtatcgtggtcgccaaccgcacattggagcgcgccagcatcctcgccgagcagttcggcgcccatgcggtgttgctggcggacattccggccgaactggtgcgcagcgatatcgtcatcagctccaccgccagccaactgccgatcctgggcaagggcgcggtcgagagcgcgctgaagctgcgcaagcacaagccgatcttcatggtggatattgccgttccccgggatatcgaacccgaagtcggcgagttggacgacgtttacctctacagcgtcgacgatctgcacgaagtggtcgccgaaaacctcaagagccgccagggcgccgcccaggctgccgaggaaatggtcagcaccggcgccgaagacttcatggtgcgcctgcgtgaactggcggcggtggacgtgctcaaggcgtatcgtcagcaaggcgaacgcatgcgcgacgaggaattgatcaaggcccagcgcttgctggccaacggcagcagcgccgaggaggtgctgatgcaactggcccgtggcctcaccaacaaattgctgcatgcacccagtgtgcaactgaaaaagcttaccgccgaaggccgcctcgatgcgctggccatggcccaggaactctttgccctcggtgagggcgcgtcagatagctcttcggataaaaaaccgcaatgaaagcgtcactgctcaataaactggacgtgctccaggaccgtttcgaagaactgaccgccttgctcggcgatggcgaggtcatctccgatcagaccaaattccgtgcctattccaaggaatacgccgaagttgagcccgttgtggccacttacaagaatctgctgaaggtgcaggccgaccttgaaggtgcccaggcactgctcaaggacagcgacccggacatgcgcgaaatggccgtggaagaagtccgcgaagccaaggaaaaactcgccgagctggaaggcgacctgcaacgcatgctgctgcccaaggacccgaatgacgggcgcaacgtgttcctcgaaatccgtgccggcaccggcggtgacgaggcggcgatcttctccggcgacctgttccgtatgtactcgcggtatgccgaacgtcgcggctggcgcgtagagatcctgtccgagaacgaaggcgaacacggcggatataaagaagttatcgcacgggtcgagggcgacaacgtctacggcaagctcaaattcgagtccggcgcgcaccgcgtgcagcgtgtccccgcgaccgagtcccagggccgtatccacacttcggcgtgcaccgttgccgtgttgccagaaccggacgagcaggaagccatcgagatcaacccggccgacctgcgcatcgacacctaccgctcctcgggcgccggtggtcagcacgtcaacaagaccgactcggcgatccgcatcacgcacttgccgtcgggcatcgtggtggagtgccaggaagagcgctcccagcacaagaaccgggcgcgggctatgtcctggctgtcggccaaactcaatgaccagcagaccagcgccgccgccaacgcgattgccagcgagcgcaagttgctggtgggctcgggcgaccgctccgagcgcatccgtacatacaactttgcccaaggccgggtcaccgaccaccgggtcaacctcaccctttactccctggacgagatccttgccggtggagtggatgcggtgatcgagccgttgctcgccgaataccaggccgatcaactggccgcgataggtgattaaatgaccattatcgccagcctgctgcgcgccgccgacctgcccgactcgcccacggcgcgcctggatgccgaattgttgctggcggctgccctgggtaagtcgcgcagttacctgcatacctggcccgagaaaatcgtcagcagcgagcacgcgctgacctttgccggctacctgcaacgccgtcgcggcggtgagccggtggcctatatcctcggccagcaaggcttctggaagctggacctggaggtcgcgccccacacgctgatcccgcgtccggataccgaattgctggtggaaaccgccctggaattgttgcccgccacgccggccaaggtcctcgacctgggcactggcagcggcgccatcgccctggccctggccagcgaacgcccggcctggcaggtcaccgccgtcgaccgtgtgctggaagccgtggccctggccgagcgcaaccgccagcggttgcacctcaataacgccacggtgctgaacagccattggttcagcgcgctgcacggccatacctatgacctgatcatcagcaacccgccgtacattgccgccaacgatccgcacctggtggcgggcgacgtgcgtttcgagccggccagcgcattggtggccggccatgatggcttggacgacctgcgcctgatcatcaaagaagccccggcccacctgaatgccggtggccggctgttgctggagcacggttacgaccaggccccggccgtgcgcgacctgctgttgagtgaagggtttgaagaggtgcacagccgcatcgacctcggcggccatgagcgcatcaccctggggcgccggccgtgctgaccgatcaggagctgttgcgctatagccggcagattctgttgcagcatgtcgacatcgacggccagttgcgcctgaaaaacggccgtgccttgatcgtcggcctcggtggcctgggcgcgcccgtcgcgttgtacctcgcagctgccggcgtcggcgagttgcatctggcggacttcgacaccgtcgacctgaccaacctgcaacgccagatcatccatgacactgacagcgtcgggcagaccaaggtcgactcggccctgcgtcgcctggcggcgatcaatcccgagattcaactggtcgcccatcgcaccgcgctggatgccgactccctggctgcggcggttgaagcggtcgatgtggtgctcgattgcagcgacaacttctccacccgcgaagccgtcaacgcggcctgcgtcgccgccggcaagcccttggtcagcggcgcggcgatccgtcttgaagggcagctgtcggtgttcgacccgcgtcgcgccgagagcccgtgctaccactgcttgtacgggcacggcagcgataccgaactcacctgcagcgaggctggtgtggtcggcccactggtcggtgtggtcggcagcctgcaagccctggaagccttgaaactgctggccggtttcggtgaaccgttggtaggccgcttgttgctgatagacgccctggccacgcgctttcgcgagttgcgcgtcaagcgtgaccccggttgcagcgtgtgcgggacgccacatggttaagggcgcgccgatcggtgtgttcgattccggtatcggtggcttgaccgtgctggacgaaatccaccagctattgccccaggaatcactgctgtacgtggccgattgcgggcatatcccctacggcgagaaaagcccggcgtttatccttgaacgctcgcggcaggtggcggcatttttccaggcgcagggcgccaaagcctttgtgattgcttgtaataccgccactgttgccgccgtcgctgatctgcgtctggattttcccgattggccgctggtggggatggagcctgctgtcaaaccggcggcggcagccacccgcagtggcgtggtcggggtgcttgccaccaccggcacgctgcaaagcgccaagttcgccgcgctgctcgaccgcttcgctaccgatgtgaaggtcatcacccaaccgtgcccgggcctggtggagctgatcgaaagcggtgacctgaccagcccggccttgcgccagttattgcagggctatatcgacccgctgctcagcgccggttgcgacactgtcatcctcggctgcacccactatcccttcctcaagccgctcctggcgcacatgctgccccccagcatcatcctcatcgacaccggcgctgccgtggcccgccagctcaaacgtttgctgggtgagcgcgacctattggccgtcggcaatccagcaccggcacagttctggaccagcggcgatgtgtgtcacctaagaaatatcctaccgacactatggaaatatccgggcgttgtgagaagcttcggctcgtgaaaatttcgtgaaatacccgcgttattagctggaacttctggctacacgccagcttcctatagcgagatagcctgtagaaaatcatataacttcgttcggaaaggatgtttcttatgaagcgcttgttctgtttggctgcgattgcggccgctgtagtggggcactctgtttcggcgcaggccgctggcctggaactgggggtggggagcaccagcgattcgaccatgacctaccgtttggggctgacatcggactgggacaaaagctggtggcagagcgataccggccggttgaccggctactggagcggcgcctacacctattgggatggggacaagcgggccagcgccagcagtctctcgttctcgccggtgtttgtgtatgaatttgccggggagtcggtgaagccttacatcgaggccgggatcggggtcgcagtgttttcccgcaccaagctggaggacaacaacatcggccaggcctttcagttcgaagaccgcctgggtttcggcctgcgcttcgcgggtgggcatgaggtgggtattcgtgccacgcattattccaatgcgggtatcagcagcaataacgatggggtagagagctactcgttgcattacaccttgccgttgtaactcttcaggacactgaaaaaaatatgtgggaggggcaagccccctcccacagttgattgccacaatcttcagcatcagcggtaggcggtagcgataccctgtcgctcttccaggcactccggcgcgcccatctcgaactcccgacaaatcagtggccgccgctcgtagatcgtgcacatcatcgtgtcccggtccagcgccgcgcaccagccgtcgtccaggcgcagcatcacttcaccgccccactcatcggtatcgatatagcgctccggcacgccggtgtcggtgatcaacatgacttccagctggcagcagcaggccgcacacgtcgagcaggtgacggcgggttcggcgatttgggtgtgggggatgttggtcataggcgtgcagtgtaaggcaagcgggtgacgcacgtgtgaaacggctgacggacgtcagcgcgccagccgatgcaaacccacaaacaccatcgcccacagcagcgccagcgcaaccatcgtgggcgcgaagccgaaaccaaactgcacccctgccagttggctaccggcgtaataagacagcgggccgcccagcgcacccagcacggcggcacgccaccagggacgggcactccaggccaggcaatgacgcaacgtcgtcgccagcaatgcccatagcaggatcaaccagaagggaatcaacgtgcccggttccgtgaactcaaacacccccagcatgcgcaacgcggtgtccaatagggtgcccagaaccatcacgctcaggatcaacctgccgtcttcagcccacgaacttatccacagcaggtgaactgccagcacggcaagccccaccattaaccacgggctgtccccacccagcacacaggcaaaccaaccgcactgaaacagcacggcattggccagcgtcttaagcattgaagcgcccgagcagcggcgggttgatcgccgatggcttggccagcagcaattgcgcggtgccaatggtgcgctccatgaagccgccttcgcagtagcacaggtaaaactcccacaggcgcaggaagtattcgtcgtagcccagctcggcgaggcgaccgtgggcgcgacgaaaattctcatgccacaggcgtagggttcgtgcgtagtgcaggccgaaatcttccatgtgcagcaggttcatgtcggtgttgcggctgacgatgtgcagcatgttctgcacacagggcagggcgccgccggggaagatatagcgctggataaaatccacgctgcgcttggcctgttcaaagcgttgctcacgaatggtgatggcttgcagcaacatcagcccatcgttcttgagcaggtgcgcgcactgtttgaagtaggtcggcaggaagcgatggcccaccgcctcgatcatctcgatggacaccagcttgtcgtattggccggtgaggtcgcggtagtcctgcagcagcagcgtgacctggccttgcaaccccagggcttcgatgcgctgttgggtgtaggcgaactgttccttggagagtgtcgtggtggtgacctggcagccgtaatgctgcgccgcgtacagcgccatgctgccccagccggtgccgatttccagcaggtggtcggtgggcttgagggcaagcttctggcagatgcgctccagcttgttcaactgcgcctgttcgagggtgtcgtcgggcgtcagaaactgcgccgctgagtacatcatggttgggtcgaggaattcttcgaacaggtcgttgcccaggtcgtagtgggcggcgatgttcttctgcgaacccttgcgcgtgttgcggttgagccagtgcaggccctgggtgaacggccgcgccaggcgtgccaggccgccttccattgcatcgagcacgtccaggttgctgaccatcacgcgcaccacggcggtcaggtccgggctggtccagtaaccgtggataaacgcttcgccggcgccgatggacccgctggccgccacgaggccccacacggcagagtccaggatctggatttcccccagcaagtgcgcttcccgtgcgccgaacacttgccgctcgccgtcctcgatcaccaccaactggccatggcgcagttggctgagttggcgcaataccgccttgcgcagcagcgcggcggtcatgccgttgacgttcaggcggtgagtcttgaccgataagctaggggatttcatggcggcgatccttggtgtacccgactgcggtgcgagaggcgccatcggcggcccggtgggaaaaaatcggcgtgcgtttgagcaacaggcgcaaggcctgccagtaaatggcgaggcaggtcttggcggtcatccaggggaaacgccacaggtagcgatgcaggctggcgcgatccagcgtttctttctccaggctcaacgtggcgtcgaagattttctgcgtgccctgccaatcggccatgtgcacgccgagcctggcggcgggagggctgaagctcatgcggtattccaggtcgcggggtagaaacggcgacacatggaaggccttggccacggcgaaatgctggtgctcatcggcgtccagggcctgggccggcagcacgtagtgatagcgttcgcgccatggggtgttggtcacttcacacaggatcgcggccagacgtccgtcggcctcgaagcagtagaagaaactcacggggttaaaagccaggccccaactacgggcctgggtcagtaggcagataacgccctggggtgtatgccccagtgccttgccgacttcctgacgcacggcatcgctcaagctcatgccggtgcgcgtccattcacgcaggtaatcctgctggcgaaaaccgaagggggccaggcgactgcgcccggccaggggcgagagcccaagcacttggtgttcttcgctcaaatccaggtacagcaggccgatgcggtagcgaaacgcatgggctttgggcgcaaaccgccgatgggcgatccagccgctgtacagggcgctgttcacagggtttccccaaaggcttcggccacgcgcaatgcgctgaccacgccgtcttcgtgaaagccgttggcccagtacgcgccgcagtaaaacgtctggcgcacaccggatatttcctcgcgacgcgcttgtgccgccaccgccgccaggctgtattgcgggtgggcgtaggtgtagcgggccagcaccttcagtgggttgatcattggcgtctggttgaggctgacgcaaaacgtggtggcgctgtcgatgccttgcaggatgttcatgtcataggtcaccgccgcctgtgcctggcgatcgccggtcagccggtaattccagctggcccaggcgagtttgcggtcgggcaacaggcgcgtgtcggtgtgtagcaccacgtcattgtcggcgtagggcatggcgccgaggatctcctgttcggcctggctcgggtcggccagcaacgccagggcctggtcgctgtggcaggcgaacaccacgcgatcaaacccttcactgccggccgggctgtggataaccacaccgttgtcggtgcgtgccactttatgcacagggcaattgaggcggatctgttcgcgaaaactgcgggtcaagggttcgatatagttgcttgaaccaccttcgatcacacaccactgcggacggttgttcaccgagagcaacccgtggttcttgaaaaagcgcacaaagaactgcaacgggaaccccagcatatcggccagggacatcgaccagatcgccgcgcccatcggcacgatgtagtgccgcacaaaccgctcgccgtaaccaccggcgctgagatagtcgcccagggtcatctcggcgctgatgcgctgctcctgcaggtccagcggcgcctggcgattgaaccgcaggatatcgcgcaacatgccccagaaccccggcgacaggatgttgcgacgctgggcaaacaggctgttgaggttgttgccgttgtactcgaaccgggtgtgctcgtcgcacaccgaaaagctcatctcggtcggtttgaacgccaccccgatctgccccagcaggcggatgaagttggggtaggtccagtcgttgaacacgatgaaaccggtgtcgaccgcgtagcgtttaccctcgacggtgacgttgaccgtgtgggtatgcccgccgacgcggtcgcccgcttcgaacagggtgatgtcgtgacggcggctgagcagataggcgctggtcagcccggcgatgccgctgccgataatggcgatcttcacaggtcgtcctttttcggcggcgggctgcgcaacatgcgcttgccgatgatcagttgcgcacggttcggcagtttcgacagcggccacaacgtggcgatgaacagtgcgggaaaggcgatttccaacgggcgcttttccagcttggcgaaaatatgccgtgcggctttatccgccgaccaactgaggggcatggggaagtcattgcgttcggtcagcggcgtgtcgacaaagcccgggctgatcacggtgacgtcgatattttccggcgacaggctgatgcgcaaggattcgaacagatagcgcaggccggccttggacgcgccataggcctcggcgcggggcatcggcaggtaggtcacggcgctggcgacacctaccaggtgcggcgtgtgcccggcgcgcagcagcggcagggcggcttcgatgcaataactgctggccagcaggttggtacgcaccacgtgctcaatgatcgatgagtcaaactgccgggcgtccacgtactcacaggtgccggcattgaggatgaccgtgtccagcgcgccccaggccacgccaatgcgctcaccgatctcgcgcacggtctggctgttggtcaggtcgccggccaccaccaacacctggccagggtagcgttgggcgagggcttccagcgggcctttcgaacgtgagctcaaggcgacgtgggcgccgctgttgagcaactccacggccagcgcggcaccgatgccactgctggcgccggtcagccaataacggcgaggcaatgtacggctcatcccattctccttttcagccagcccacgacgttgcccagcacgggcaagtgttcgtagagcatggcgccggcatcgaaataatcgcggtggcggtacaccttgtcgcgccacatcacgtgcgaacaaccttccacccggatcaccttgccgttggccaggcgtgggtggcagaaactcattttccagcgcaggtaaccctcaccttcggccacctgatcgaaaccgtggaagtcgaagcgtagctggctgacgttgctgtacagctcggcgaaatagcggtgcatggcgggcaggccctgcacctcgtgcagcgggtcggtaaagcggatgtcctggctgtacaggctgtcgagcaagtgcaggttgtgcttgtccagcgtggaaaaggcctgggcgaagcggcgcaggaagtcactcatactcgccccctgcagcttgtcgcgagggcaggctgcggaaggcggccagggcgcgttcacgggactttttcaggtcgacaatcgaacgcgggtaatccgccacgccgaacaagccaccggcggcttcggggttgtgtacttcttttttattcagcgcggccagttccggcagccagtgcttgatgaacacgccttcgctgtcgaatttttccgactggctcaaggggctgaaaatccggaagtatggcgccgagtcggtgccggtggacgaactccactgccagccgccgttattggccgccaggtcgccgtcgatcaggtggcgcatgaagaaacgctcgccctcgcgccagtcgatcagcaggttcttggtcaggaacatcgccacgaccatgcgcagacggttgtgcatccagccggtttcgagcagttggcgcatggccgcgtcgatgatcggcaggccggtgcgcgcttgctgccaggcggccaggtccttgggcgcgttgcgccaggcgacggcttcggtctcggggcggaacgcccggtggcgcgacacccgtgggtaacccaccaggatgtgcttgtagaactcgcgccaaagcagttcgttgatccaggtgatggcgcccatgtcgccgctttcaaactcgccgccgttggtttgcaacgcggcgtgcaggcactggcgcggcgataccacgccggcggcgaggtacgccgacagctggctggtgccgggcttggcggggaagtcgcggtcgtccttgtagtagctgatctgttggtcggcgaaggcgtcgaggcggcgccgggcttcggcttcaccagcaggccagagcgcgcgcagagtctcgctgggcggctcgaaaccgtcgactgtcttagggactgggtcgcttttgagcgtgagcgcagcctgggccttgggggccgcgactatccgcggcagtgcgctgtgcaggcggctgtagcagaccttgcggaattggctgaatacctggaagtaggtgccggtcttggtcagcacgctgccgggttggaaaaacagttggtccaggtagctgtggaagctgatgcccgccgactccaatgccttggacacggccgcatcgcgacggctttcatgaatcccgtattcctcgttgacgtgcaccgactccaccgccagttcacggcatagcgtgcccagcacgtcgggcgcctggtcccaggtggcggcggtacggatcagcaggggaatgttcagttcgccgagggttttgcccaggtcgtccaggttgcgcagccagaaatccaccttgcacggtgcatcgtcatgggccagccattgttcgggcgtgatcaggtacacggcggcgatcgggccccgctggctcgcggcggtcagggcggtgttgtcgtgtaggcgcaggtcggtgcgcagccagatcaaatgcatttaaacgagtccacgctggatcagtagctggtgggccgacaacaactcttcggcgacgaacaattcagggatgtcatgggttaatacggccaactcggcctggtggatgcataccgttggtccgacgatcaactttgggcaacggacgccgcccaaaagttttgccagccccgacacatgcagcgctttgctcgaatacaacagcacggcccgcggttgcaggtgctccaccgccagggccagttcgccagcgggcaaaggccagtcgaacacttccaccgggcaatcggcactgctggcgagccaggcgctgagccacaggtgtggctccaggggcaggtcggactgattgaccagcaacaacggcgcgccgtgcaactggcgattgttgtggtaaatgcgtgcgccgaatttgctgcgcagccatgagaggaaaaacacccgctccatctgcgcgccgaactggccttgccaacgctgttccaactctcgcagcagcggcagcatcaattgctcgcacaacgtgcgtggcgggtacagcgccatggcctggttgaaggcgtcatcgacccggcgttcgctcaattcgctgatggcttgcaccaggttctggcgcaggctgtgccactcgttttccaccgcctcaggaagggactgggccgagtcgatcaggcctttgacctggctcaccggcacgccgcgattgagccaggtgaggatggtgtggatgcgctgcacatgctcggcactgaacagccgatggcccttgggcgtgcgctggggcacgatcaggccgtaacggcgttcccaggcgcgcagggtcacggcgttgacgccggtctggcgcgccacttcgcggatcggcagccagccatcttccagtgcttgggcgatgtcgtcgccgggttcgtctagcagggcagctttcatggtctagatcgcatttcgcaggctgaggttttccgggtgcggttgcaggtaggcctgctgcgcgatgtagcggtccgggtgttggcgaaagtggtgtttgagcagggtcagcggcaccaccagcggcacgatgccgtggcggtactggccgatgacggtctgcatttcctgcttgtcatcggcgctgatgacctgcttgaggtaaccgctgatgtgttgcagcacgttggtgtgggtgccacgtgtggcgcattgggtgaggccggtcatcaagtcgctgaaataacgggtcgccaattcatcgagctgggtgcccttgttcatgctgcccagcaggtggccaaggcttttgtagtgtgccgggctgtgggccatcaacaagtatttgtagcgcgaatgaaaggccagcaggcggtggcgtgtcaggccttcggccaacagtttctgccagctggcgtagacgaatacgcgggtcaggaagttttcccgcagcaccgggtcgttcagccgaccgtcttcttccaccggcaggttgggatggcgcgcacagaaggcctgggcgtaaatgccgcgcccgccgccgtccaccggcgtgccattgtcacgatagaccttgacccgctccaggccgcacgacggcgatttctgcatgaagatgtagccgcacaggtcggtatgttccgcagccatctgctggccgtaatcgtccagcggctgggtgacattcaactcgcggttcacggtgccgacggcttgcgggtgggaggggtctcccaccagacggatcggttcgcgtggaatgcccaggccgatggcgacttcggggcacagcggcacgaagtcgaaatagtcggcgagggtctggctgcacagcagggattgtttatggccgccgttgaagcgcacgttctcgcccaacaggcaggcgctgatggcgatcttcggtttggtggtgctggacatacacgaaccctcagcgagattcctgtacaagatttaaatcctgtacaactaaatctcatcataggttcgatgctgtacaagtcaaattatttgtacaagttttgcgagtgcgctatttccagccgattttccaggcgtcgatatcctgcagggtttgccagggcaggcgctcgctgcggtgtgtcatcacggcctgcagttcaatgtcgagcaccgtgccttcttcatcacgaaacagctcggtgaccagaaagtgtttttctttgttgcgagggtggactgctgtccacttcgacagcagcaatttggcgggattgatgcggttcattgcaggtgctcgatcaagcgtcgtgcggcttcctggccgctgagccaggcaccttccacacggcccgacaggcaccagtcgccacacacgtacaggcccaggtcggcatcggccagcacaccgaattcgtggctgctggatggtcgagcatagagccagcggtgcgccaggctgaatgacggcgcgggcatggcgctgtgcagcagttcggcgaaggcgccgtgcaggtgctcgatcaccgcctctttgggcaggtccaggtgtgccttgctccaagcgctggtggcgtgcagcacccaggtgtcgagggtggtatcgcgcccaggtttgctgcggttgcgcgctagccagtcgagggggctgtcttgcacgaagcagccctccatcggggtatccaggggtttatcgaaggccagggcgatggcccaggtcgggtccattttcaccccggcggcggcactcgccagcttgggcgctgcggccagcaaggcggtggcctggggcgcaggcgtggcgatgatcacgtggctgaaggggccatggttttcgccgtccgcgtccagcaggttccagtggtgtttgccctggaacacctcggtgatgcggcaaccgaactccaccggcaggtcgtcgagcagggcgcgggtgattgcgctcatgcgcggcgtgccgacccagcggatctgttcatcgggggagggagtgagctggccggacttgaagttgtacagctggggcttccattgctcggcccagccgtggctttgccagcgttgcacttcgttgacgaagcgccggtcgcgggcggtgaagtattgcgcgcccatgtccagggagccggcatcgctgcgcttgctggacatgcgcccgccactgccgcggcttttatcgaagagttgtacaacgtgccccgcgtctcgtaacgctcgggcggcggagagaccggcgatgccggtgccgatgatcgcgatgggaacagtcatgggaggcctcgttttaccgttgtgcacagactacgcggacaccaatagctgtacaatattgttttttggtataagttttggcgtacctgttctaacggcgtaacctatggttaaagctgaggcttaagccagcgttacgcctgctaacaaatgatccctgtttataaaatagaccagtgatcggcggcgaacgttacatgaggagcgtcccatgcatattttgctgaccggcggtactggtttgattggccgccaactctgccaacactggctcacccagggccatcgcctgaccgtgtggagtcgccacgtggatcaggtcgccaaggtgtgcggcgctcaggtgtcgggagtcagccgcctgcaagaggttatcggcccggtcgacgcggtcattaacctggcgggcgcgcccattgccgaccgcccctggacccacaagcgcaaggcgctgttgtggagcagccgaatcagtcttaccgagaccttgctgacgtggcttgagggcctggaacaaaaaccggcggtgttgatttccggttcggcagtgggctggtatggcgatggcggcgagcgcgaactgaccgaagccaacggcccggtgcaggacgatttccccagccagctgtgcatcgcctgggaagaaaccgcccagcgcgccgaagctctggggatgcgtgtggtgctggtacgtaccggcctggtgctggcggcgcagggcggctttttgtcgaggctgttgctgccgttcaaactggcgctgggcgggcctatcggcagtggtcggcagtggatgccgtgggtgcatatcgaggatcaaatcgccctgattgattttcttctgcaccagcctgacgccagcggtccttataatgcctgcgcgccacacccggtgcgcaatcgcgagtttgcgaaaaccctgggccaggtgctgcaccgcccggcgttcatgccgatgccggcctttgcattgagggtgggcctgggcgagttgtccggcctgttgctgggcgggcagaaggcgctgcccgagcgcttgctggctgccggtttcactttccagttcactgagttgcgtgcggctttggatgacttgtccagccgcctctaaagataggatgttgcatgacggatcacgcgttgttactggtcaacctgggctcgccggcgtccacttcggtggcggatgtgcgcagctacctcaatcagttcctgatggacccttatgtgatcgacctgccgtggccggtgcggcgcttgctggtgtcgctgatcctgatcaagcgccccgagcagtcggcgcatgcctacgcgtccatctggtgggacgagggttcgccgctggtggtgctcagtcgccgcctgcaacagcagatgacttcgcagtggacccagggcccggtggagttggcgatgcgttatggtgagccgtcgattgaaagcgtgctgacccgtctcgccgcccaaggcattcgcaaggtcaccctggcgccgctgtatccgcagtttgccgacagcaccgtgaccacggtgatcgaggaagccaagcgcgtggtgcgcgacaaaaagctcgacgtgcaattctcgatcctgcaaccgttctacgatcagcccgaatatctcgacgccctggctgccagcgtaaggccgtacgtggaacagcattacgaccacctgctgctgagtttccacggtttgcccgagcgccatctgaccaagctcgaccctaccggccagcactgcttcaaggatgcagactgctgcaagaatgcgtccgccgaggtgctcaagacctgctatcgcgcgcagtgcttcagcgtcgcccgcgactttgccgcacgcctgggcttgcccgaagacaagtggtcggtggccttccaatcgcgcctgggccgcgccaagtggatcgaaccctacaccgaggctcgccttgaagcattggcccagcagggcgtgaaaaagctgctggtgatgtgcccggcgttcgtcgccgattgcatcgagacgctggaagaaatcggcgatcgcgggctggagcagttccgcgaggccgggggcgaggagttggtgttggtgccgtgcctgaatgatgatccgcagtgggcgaaggcgcttaataccctttgcgagcgcgcacccacggcgctgtaaccaaaccaagtgaagatcaaaatgtgggaggggacttgcccctcccacattttggttgtgttacaggttgagggtcaggctgaccgtgaggttgcgcggttcgcctgggctgatccagtagttgctgtaggaccgctcgtagtacttctcatcaaacaggttgttgaggttcaagcccacggtgacgttgtcggtggccttgtaatgggccagcagatcaaccgtgtggtaggccggcaattcgaaactcgtgccggcttcaccagagcggtcccccacataggtgaacgccgcccccaggtctgaaccgcgcaacgcaccatcctggaactcatacacccccaacaggctgccgctgcgcttggccacgccgagtatccggctgccggcaggaatgactttgtcgcccttggtcacttcagcatcaatgtaggcaaacgcgccaatcacccgtacggcgtcggtcacttgcccggacagttgcaggtcgaggccctggctgcgcgccttgcctacggcgcggttgaggttggtggccgggtccaggctcagcacgttttccttttctatatggaaggctgcgatcttagcgctgaggcgctcgtcgaacagctcgctcttgatccccacttcatagcccacgccttcctcaggcttgaaggacttgttgtcggcgcccaacccgctattgggcttgaacgaagtagaggcgttggcgaatacgccgacttgcggcgtgagctgatagagcaggccggcgcgctgggtaaaggcgttgtgggtttgctcggctttggcgtggttgcgggtgaagtcgtcgatacgctgctcgaaatgctcgaagcgcgctccgaccatgccgcgcaggcggtcggtgaagacgatctggtcttgcaggttcagcgcgtggctcttggtctgttcgaagaagtcggtgccggagcgcaggccgttgggtttggcctggccgtagaccgggttgtagatgtcgatgctgtagcggctaccgccaatcgccgtgacgcgctctttcttgcgatagtcctcgtattcggtgccgatcagcagttcgtgctgccaactgccgatgtcgaacaggccgcgcagctcgagctgggtaatgctgtcgtgccagcccatggagcgttcacggtagcggcggtcgatggtgtgaccgtcggcattcagtgcacggttttccgaggcgtcgccccacaggctgccttgtttgtagtggctggccagacgcagtttccaggcatcgttgaggtgatgctcaagggtggcctggagacgattgttgtggttgtcgatatcgccgtcgttgggttcgccgaggaaggtggaacgagatacgccgggggcgtcgacgatgccacggtcgaaggtagagctgtggcggacgaattcactctcgacgagcagactggtgtccgggtccagttgccaactgaacgaaggcgcgacgaatacccgcttgctctgcacgtgatcgcggaagctgtggttgtcttccaccgccaggttgacccgcgacagcaggttgccttcgccgtccagcggagtgttcacgtccacggcggtgcgatagcggtcccaactgccggcgctggtctgcacggtggtgaaggcttctggctggggcttcttggtgacaatgttcacggtgccgccgggatcgccgcgtccatacaggctggcagcggggcccttgagtacttcgatgcgctcgatattggccgcgtccggtgtactcgggtagccacggttggcgctgaaaccgtcctggtagaactcggacgtggtgaagccgcgcacgctgtattcgtacagagtcaggccgccgaagttgttttgcttggacacgccgccggcaaattccagggcgcgttccacgtgggtactgcccaggtccttgagcactgtggcgggaattacgctgatggattgcgggatgtcgcgaatggcggtgtcggtttttgtcgcgctggcggagcgggtggcgcggtagcctttgaccgggccggtggcggactcataggcgtcggtggtgacgctgatggtgtcgagttccagggtgttttcttcggcgaaggcggggtcgagcagcaaacccaaggccaggccagccatgggggcgattcttcgagacggcatgatagagcgttccaatagcgatattgaaacaatataacatgcctaatgagaatgacttgctttgaaatatcagtttacaggtgcccgggaaggggcacctgcaagcggcgacctattcctcttctttgaccggcgcgggcggcggacgcagcccgatttccgccagcaacttgatctctttgccgttgcgcatcacctggatcgccaccttctcggtcggcttgatccgcgccacctggttcatcgacttgcggccatcaccggccggttcgccgttgatgctgaggatgacatcccccagttgcaggccggctttctgcgccgggccatcgcggaagatcccggcgaccacgatgccagggcgtccggtcaagccaaatgactcggccagctccttggtcagcggctgtacctcgatccccagccagccgcgaatcacctggccgtgctcgatgatcgacttcatcacctccatcgccagcttcaccgggatcgcaaacccgatgccctgggagccgccggacttggagaagatcgccgtgttgatgcccgtcaggttgccattggcgtccaccaatgcaccgccggagttacccgggttgatcgccgcgtcggtctggatgaagtcttcgtagctgttaaggcccagttggttgcgcccggtggcactgataatgcccatggtcacggtctggcccacgccgaacgggttgccgatggccagcgccacgtcacccacacgcaaaccgtcggaacggccgagggtgatggagggcaggctcttcaaatcgatcttcaataccgcaaggtcggtttccgggtcgctgcccaccactcgggccagggtttcgcgaccgtcacgcagggccaccacaatctggtcggcgccggtggtcacgtggttgttggtaaggatgtaaccttcggggctcatgatcaccccggagcccaggctggactccatgcgacgctgcttgggtccgttgtcaccgaagtaacggcggaactgcgggtcttcaaacagtggatgggccggtttgttgatcaccttggtggtgtacaggttgaccacggcaggggcggcgatcaccacggcatcggcgtaggtcaccgggccttgcaccaccgaattgctttgcggcgcctgttgcaggttcacatccaggctgggcagccccaccagctcggggtaacgctgaataatcagcatcgcgatcagcacgccagccagcaatggccatccaaaaaaacgcagcgccttgagcatcaagtaagtcctgacaggttgcagggggcgggagagcgcccataatgtcgcgcattatacgaggctgtgacgcctgcgaaccggatatttaggagtcttttatggccgtcccccttaccaccctcgtcgaggaagcggaccgctacctcggcagcgcaaaaattgccgattactgccccaatggcctgcaggtcgagggccggccacaggtgatgcgcatcgtcagcggcgtgaccgccagccaggccctgttggacgcggccgtcgaagcccaggcggatctggtcctggtgcaccacggttacttctggaaaggcgaaaacccgtgcatcaccggcatgaagcagcgccgcctgaagacgctgctcaagcacgacatcagcctgctggcctaccacctgccgctggacctgcatcccgaggtcggcaacaacgtgcagttggcccgtcaactcgacatcaccgtcgaaggcccgctggacccgggcaatcccaaaatcgtcgggctggtcggctcgctcgccgaaccgctgtcacctcgcgactttgcccgccgcgtgcaggaagtcatgggccgtgagccgttgctgatcgaaggcagcgagatgatccgccgcgtcggctggtgcaccggcggtggtcagggctacatcgacgacgcgattgcggccggtgtcgacctgttcctcagcggcgaagcctccgagcagaccttccacagcgcccgcgaaaacgacatcagcttcatcgccgccggtcaccatgccactgagcgctacggcgtgcaggcgctgggcgattacctggcgcggcgcttcgcgttggagcatttgttcatcgattgtcccaacccaatctaacaaacaccaccgaacaaatgtgggagggggcttgcccccgatggcggtggatcagctactcatgcagtgactgacacatcgctatcgggggcaagccccctcccacacttgaccgcgattaaccccaaactccgtggtatatccatataccgtttcggtctagtaggccgcctgaatagaagcaggtgctgtgctagcatgccccgctcgaacacggcccgctggccgtccataagatcgtttttccgtgagtaaccatggtcgacaaactgacgcatctgaaacagctggaggcggaaagcatccacatcatccgcgaggtcgccgccgagttcgacaacccggtgatgctctactcgatcggtaaagattccgccgtgatgctgcacctggcacgcaaggccttcttcccgggcaagctgccgttcccggtgatgcacgtcgacacccgctggaaattccaggagatgtacaagttccgcgacaagatggtcgaagaactgggcctggacctgatcacccacgtcaacccggacggcgtggcgcagaacatcaacccgttcacccacggcagtgccaagcacaccgacatcatgaagaccgaaggcctcaagcaggccctggacaagcatggtttcgacgcagcctttggcggcgcccgtcgcgatgaagagaaatcccgtgccaaagagcgcgtgtactcgttccgcgacagcaagcaccgctgggacccgaaaaaccagcgccccgagctgtggaatgtctacaacggcaacgtcaacaagggcgagtcgatccgcgtgttcccgctgtccaactggaccgaactggacatctggcagtacatctacctggaaggcatcccgatcgtaccgctgtacttcgccgccgagcgtgaagtgatcgagaagaacggtacgttgatcatgatcgacgacgaccgcatcctcgagcacctgtccgacgaagacaaagcccgaatcgtcaaaaagaaagtacgtttccgtacccttggctgctacccgttgacgggcgcggtggagtccgaagccgagacgctgacggacatcattcaggaaatgctcctgacgcgaacttccgagcgccagggccgtgtcatcgaccacgatggcgcaggctcgatggaagataaaaaacgtcaaggttatttctaaggggctgtcatgtcgcatcaatctgatttgatcagcgaggacatcctcgcctacctgggccagcacgagcgcaaggaaatgttgcgcttcctgacctgtggcaacgtcgacgacggcaagagcaccctgatcgggcgcctgctgcacgactccaagatgatctacgaagatcacctggaagccatcacccgcgattcgaagaagtccggcaccaccggtgacgacatcgacctggccttgctggtcgacggcctgcaggccgagcgggagcaaggcatcaccatcgatgtcgcctatcgctacttctccaccgccaagcgcaagttcattatcgccgacacccccggccatgagcagtacacccgcaacatggccaccggtgcgtccacctgtgacctggcgatcatcctgatcgacgcgcgctacggcgtgcagacccagacccgtcgccacagcttcatcgcctcgttgctgggcatcaagcacatcgtggtggccgtcaacaagatggacatcaatggctttgaccaaagcgtattcgagcagatcaaggccgattacctgaagttcgccgacggtatcgccttcaagccgagcaccctggccttcgtgccgatgtcggcgctcaagggcgacaacgtggtgaacaagagcgagcgttcgccctggtacaccggccagtcgctgatggagatcctcgaaaccgtcgagatcgccaacgaccgcaattacaccgacctgcgcttcccagtgcagtacgtcaatcgtccgaacctgaatttccgtgggttcgccggcaccctggccagcggcatcgtgcacaagggcgacgaagttgtggtgctgccgtcgggcaagagcagccgcgtcaaatccattgtcaccttcgaaggtgagctggagcacgccggccctggtcaagcggtgacgctgaccatggaagacgagatcgatatctcccgtggcgacctgctggtgcatgccgacaacgtgccgcaagtgactgacgccttcgacgccatgctggtgtggatggccgaagagccgatgctgccgggcaagaaatacgacatcaagcgcgccaccagctacgtgccgggttccatcaccagcatcgtgcaccgtgtggacgtgaacaccctggccgaaggcccggcgagcgcgctgcaactgaacgagatcggtcgggtcaaggtcagcctcgacgccgccatcgcgctggacggttacgacagcaaccgcaccaccggtgcgtttatcgtcatcgaccgtttgaccaatggcacagtagccgcaggcatgatcatcgccccgccggtcggtcacggcagtgcggcgcagcacggcaagttggcccatgtggccaccgaagagcgtgcactgcgcttcggccagcaaccggccaccgtgttgttcagcggcctgtccggcgctggcaagagcaccctggcctatgcggtcgagcgcaagctgttcgacatgggccgtgcggtatttgtgctggatggccagaacctgcgccatgacctgaacaagggcttgccgcaggaccgtgccggtcgcaccgagaactggcgtcgtgccgcgcatgtggcgcgtcagttcaacgaagccggcctgctgaccctggccgcgttcgttgcgccggatgccgaaggccgtgaacaggccaaggcgttgattggcggcgaccgtctgctgaccgtctacgtgcaggcgtcgccgttggtgtgcgccgagcgcgatccgcaaggcctgtacgcggccggtggggataacatcccgggcgaatccttcccgtacgacgtgccgttgaatgccgatctggtgatcgacacccaggccctgtcactggaagaaagcgtcaagcaagtgctggagttgttgcgtcagcgcggcgcgatctaaagcctgtcgcaatcaaatgtgggagggggcttgcccccgatagcggagtgtcagtcagtacatctgttactgacccaacgccatcgggggcaagccccctcccacattcttgatcattgtttacctgggaattctctatgcagctgctccagtagctgatccttctgttcccagagctggttgatccagccctggaacgccaaccgatattccccatcctgctcataattcttgccaatgaattcggtcgggatctgcacctcttcaaactgcaccaccacgtcccgcacattcccgcacagcaaatcccaataacctgggcgcccagccgggtagtgaatggtcacgttcaccagtgacttcaactgctcccccatggcatccagcacaaacgcaatcccgccagccttgggcttgagcaggtaacggaagggggacttttgctgcgcatgcttgcctggggtaaaccgcgtgccctcggcaaagttgaaaatacccaccgggttgtcgcgaaacttcgcgcaggtcttgcgagtggtttccaggtccttgcctttcttttccgggtgtttctccaggtaggccttggtgtagcgtttcatgaacggaaagcccagcgcccaccacgccaggccaatcaccggcacccagatcagctcctgcttgagaaagaacttcagtgggcgaatccggcggttcagcacgtattgcagcaccatgatgtcgacccagctctggtggttgctggtgaccagatacgagtgctggtagtccagcccttccagcccggtgaggtgccagcgggtgcgtcgcaccaggttcatccagcccttgttgttggtcacccatgcctcatgggtgtggttcatcagccattcgctgaaacgcttggcaaacggcagggccttgaacagcgccacgataaacaggaacgaacacaacaggatcgtgttcagcgccaacaacagcgatgcaatcaccccgcgcatggcggcaggtagaaaatccagcatttagatatccataggtcggttggcggcttggatcgcagtgagcgcgatggtgtacacgatgtcgtccacctgggcgccgcgcggcaggtcgttgaccggtttgcgcaggccctggagcatcggccccaggctcacgcaatcggcactgcgctgcacggccttgtgcgtggtgttgccggtgttcaggtcggggaacacaaacactgtggccttgccggcgacctggctgttgggggccaattgccgggccacgttttcgttggcggcggcgtcgtattgcagtgggccgtcgatcagcagcgagctttgctgttcgtgggcgagcagggtggcttcgcggactttctccacttcttcgccgctggccgaatcgccgctggaatagctgatcatcgccacgcgcggggtgatgccgaacgcggctgccgagtcggcgctttgcagggcaatctctgccagttcggcggcgctcgggtgcgggttcatcacgcagtcgccgtacaccagcacctgctcggggaacagcatgaagaacaccgacgacaccagggtgcagcccggcgccgttttaatcagctgcagggcagggcggatggtgttggcggtggagtgaatgacgccggacaccaggccgtccacctcatcgagggcgagcatcatggtggcgatcaccacggtgtcttccagttgctgctcagccatcggcgcgttgaggcttttgctcttgcgcagcgccaccatcggctcgacgtagcgctggcggatcaggtccgggtcgagaatctccaggccttcaggcagttcgataccctgggcgcgggcgactgcttccacatccgccggcttggccagcagcacgcagcgcgcaatgccccgcgcctggcagatcgcggcggcttgcacggtcagcggctcgctgccttcgggcaacacgatgcgcttgttggcggcctgggcgcgctggatcagttggtagcggaacaccgccggcgacagacgcatttcccgtggtgtgccgcaacgttggtgcagccagcgcgcatcgaggtggctggcgacgaaatcggtgatgatttccgcacgctcgcggtcatcaatcgggatttccttgttgaggctgttgagctggttggcggtgtcgtaggaaccggtgctcaccgacagcaccggcagcccggcctggaacgcgccacggcacaactccatgatgcgcgggtcgggcagggtgtcgctggtcagcagcaggccggccagcggcacgccgttgatcgcggccaggctgacggcgaggatgatgtcgtcgcggtcgccgggcgtcaccaccagcacgccgggcttgagcagctccacggtgttacgcatggtgcgcgcgcagatgatgatcttggtcatgcgccgggtttcgtagtcgccggcgttgaggatctgcgcgcccatcaggtcggccacgtcgcgggtacgcggtgcgttgagttccggttgatagggaatgcagccgagcaagcggaaatcaccgctgcgcaacagcggcgaatgttccttgaggcgtgccgagaaggcttccatgctttcgtcggtgcgcaccttgttgaggatcacgccgagcactttggggtctttcgggccgccgaacagttgggcctgcagctcaacacgcccggagagttcggtgagcacttcgttttctggtgcggacaccaggatcacttccgcatccaggctcttggccaggtgcaggttgacccgcgccgcatagctggcgctgcgggtgggcaccatgccttcgacgatcaatacgtccttgcccaccgcggcttgctggtacagcgtgatgatttcttcgagcaactcgtcgagttggccgtcgccgagcatgcgctctacgtgggccaggcccagaggctgtggcggcttgaggccgtgggtgcgcgccaccagctcggtggagcgctcggggccggtgtcgccggggtgcggctgggcaatcggcttgaaaaagccgactttcagcccggctcgctcaagggtacgcaccagcccaaggctgatggaggtcagacccacaccaaaatcggtgggcgcgataaaaaaagtctgcatgcggattctctggaggtgcatggcttgggtgacgctctatggctgagcgtctaccgcgaatcaggcgccaaggttatcgttaatcgcgctcctgcgcacaccagccgcaggcaaagggctggcctaatttttcaatacgttgcgcggggtccagcacccaggcgcgtgactgccagggtggctggtggcgcaggtgctgggtgtggccgcaggacagctcggcgacccagtgctggtcgtcgtcctggtggaacccgatgatgaaggatgccgttgatcggtcccgtctgtccgggttctgttcgctttcgggcaaatccttgtttagacttgtccgttcttcattcttatgcaaaaggtctcgccccatgacgatcgccgctaacaaggctgtctccatcgactataccctgaccaacgacgctggtgaggtcatcgacagctcagccggcggcgcgccgctggtctacctgcaaggcgcaggtaacatcatcccaggcttggaaaaagccctggaaggcaagaatgtcggtgatgagctgaccgttgccgtagaacctgaagatgcctacggcgagtactcggccgaactggtcagcaccctgagccgcagcatgttcgaaggcgttgacgagctggaagtcggcatgcagttccacgcctccgcaccggacggccaaatgcagatcgtcaccatccgtgacctggacggcgacgacgtcaccgtcgacggcaaccacccgctggctggccagcgcctgaacttccaagtgaagatcgttgccattcgcgacgcttcccaggaagaagtggcccacggccacgttcacggtgaaggcggtcaccaccattgattgtggtttgatcaatcggtagcaaaaacgccccgactggttcggggcgtttttttgtgcctgaaaaaatgtgagagggggcttgcccccgattgcagtatgtcagtcagtacattctttactgacccaccgtcatcgggggcaagccccctcccacaacaaaaatgccccggacctttcggtacggggcatttcttaactgtttcgcaacctgggctgcgtagcagttgttaccacttaggctgcagcagcaacgctcagagccttgatgtggccattcaggcggctcttatggcgagcggccttgttcttgtggatgatgcctttatcggccatacggtcgataactggcacagccagaacgtaagcagcttgggctttttcagcgtctttggtgtcgatggctttaactacattcttgatgtaggtacgaaccatggaacgcaggctggcgttgtggctgcgacgcttctcagcctgttttgcacgttttttggcggaaggtgtgttggccaccgtcgagctcctcgaaagactttttaggaaatagcaaacaaaataggccgcgaatcatgccgatgacttgatgggttgtcaagggcggctgatgcgaactgctgagtggtcgatctgaagaggcgggtgatttatttccggcgcttgacctgtaaactcgcgagctttggctctgtgctgttgcaggcgcgcagtatcgcataagtgggcgctttgtacgcctgctctttatctaaaggcgcaaactctttcaatgaatctgctcaaatcgttggccgccgtcagctctatcacgatgatctcccgggttctggggtttgtgcgtgacaccctgctggcgcgcatttttggcgccagcatggccacggatgccttctttattgcgtttaaattgcccaacctgctgcggcggatcttcgccgaaggtgcgttttcccaggcattcgtgccgatcctggccgagtacaagacccagcagggcgaggaagctacccgtacctttattgcctatgtgtccggcctgctgaccctggtgctgatgctggtgacgattctgggcatgctcgccgccccctgggtgatctgggccacggcccccggttttgccaataccccggaaaaattcgcgctgaccaccgatctgctgcgagtgacctttccttatatattgctgatctccctgtcgtccctggccggggcgatcctcaatacctggaaccgcttctcggtgccagccttcgtgccgaccctgctgaacgtcagcatgatcatcttcgcgctgtttctcacgccgtacttcgaccctccagtgatggcgctcggctgggccgtgctggccggtggcctggcgcaactgctctaccaactgccgcacctgaaaaagatcggtatgctcgtattgccacgcctgaatctcaaggacaccggcgtatggcgcgtgatgcgcaatatgctgccggcgatccttggcgtgtcggtcagccagatttcgctgatcatcaacaccgcattcgcctcgctgctggtatcgggctcggtgtcgtggatgtactacgccgaccgcctgatggagctgccctccggggtgctcggcgtggccctgggcacgattctgctgccgaccctgtcgcgcacctacgccagcaaggaccgccaggaatactcgcgcatcctcgattggggcctacgcctgtgcttcgtgctggtgttgccgtgcgcactggccctggggatcctggctgagccgctgactgtgtcactgtttcaatacggccaattcgatgcccacgacgcactgatgacgcagcatgccttggtcgcctattccgttggcttgctcggcatcatcgtgatcaaggtgcttgcgccaggcttctatgctcagcaaaacatccgtacaccggtaaaaatcgcaattttcacgctgatcgtcacacaactgctcaacctggtgtttatcggcccgctggcccatgccggcctggccttggccatcagtgcgggcgcgtgcatcaacgcagggcttttgttttaccagttgcgtaagcagcagatgttccagccgcaggccggctggggtctgttcaccctcaagctgctggtggcggtcggggcgatgtcggccgtgttgctggggttgatgcacttcatgccggcgtgggatgaaggccatatgctggagcgcttcatgcgtcttggcgtgttggtcgtcgcgggtgtggtggtgtacttcgggatgttgctgctgcagggcttccgcctgcgggatttcaatcgcaagtccctgggttagagagtttgccgcgataaaacggttgttttatcgattcgacccatttggcccgttcagttgcctgtcgtccggggccgggtgtggttataatcgaccactttatgagcaagaagcgcgttatgcagctggttcgaggtctccacaacctgcgccccgagcatcggggctgcgtcgccactattggcaactttgacggtgttcaccgtggccaccaggctatcctggccaggctgcgcgaacgtgcggtcgagttgggcgtgcccagctgcgtggtgattttcgagccgcagccacgggaatactttacgcccgagactgcgccggcacgcctggcccgtctgcgtgacaagttgcaactgctggcggaagaaggcgttgaccgcgtcctctgcctggctttcaaccagcgtttgcaaagcctgagcgctgccgagttcgtcgaccgcatcctggttgatggcctgggcgtacagcacctggaggtcggtgacgacttccgcttcggttgcgaccgggtcggggatttcgatttcctgcaacaggccggcgtcagccagggttttaccgtcgaagccgcgcaaaccgtcgagctggacggcctgcgcgtgagcagtacccaggtgcgtaatgccctggcggctgccgacttcgccttggccgagcgtttgctcggtcgcccgttccgcattgccgggcgggtcctgcacggccagaagctggcgcgccaattgggcacgccaaccgccaacgtgcaactcaagcgccgtcgtgtgccgctgaccggggtttacctggtgagcgtcgacatcgacggccaatcgtggccgggagtcgccaacataggcgtcaggcccacggttgcaggtgatggcaaggcccacctggaagtacatctgctggattttgccggtgatctgtatgaccggcgtttgacggtggttttccaccagaagctgcgtgaagagcagcgtttcgcctcccttgaggcgttgaaaacggcgatcaatgcggatgtcgccgccgcccgtgcactagccgcacctagcgcccatcgctaaccgaagagccttaaatgaccgactataaagccacgttaaaccttccggacaccgccttcccaatgaaggccggcctgccacagcgcgaaccgcagatcctgcagcgctgggacagtattggcctgtacggaaagttgcgcgagattggcaaggatcgtccgaaattcgtcctgcacgacggccctccttatgccaacggcacgattcacatcggtcatgcgctgaacaagattctcaaggacatgatcctgcgctcgaaaaccctgtcgggcttcgacgcgccttatgtcccgggttgggactgccacggcctgccgatcgaacacaaagtcgaagtgacctacggcaagaacctgggcgcggataaaacccgcgaactgtgccgtgcctacgccaccgagcagatcgaagggcagaagtccgagttcatccgcctgggcgtgctgggcgagtgggacaacccgtacaagaccatgaacttcaagaacgaggccggtgaaatccgcgccttggccgaaatcgtcaagggcggtttcgtgttcaagggcctcaagcccgtgaactggtgcttcgactgcggttcggccctggccgaagcggaagtcgagtacgaagacaagaagtcctcgaccatcgacgtggccttcccggtcgccgacgacgccaagctggccgaggccttcggcctggcaagcctgggcaagccggctgccatcgtgatctggaccaccacgccgtggaccatcccggccaaccaggcgctgaacgtgcacccggaattcacctacgccctggtggacatcggtgaccgcctgctggtgctggccgaagaaatggtcgaagcctgcctggcccgctacgagctgcaaggttcggtgatcgccaccaccaccggctccgcgctggaactgatcaatttccgccacccgttctatgaccgcctgtcgccggtatacttggctgactacgtcgaactgggttcgggtaccggcatcgtgcactgctcgccggcctacggcgtggacgacttcgtcatctgcaagaagtacggcctggtcaacgacgacatcatcaacccggtgcaaagcaacggcgtctacgtgccttcgctggagttcttcggcggccagttcatcttcaaggccgaccagccgatcatcgacaagctgcgcgaagtcggtgcgctgatgcagaccgcgaccatccagcacagctacatgcactgctggcgccacaagaccccgctgatctatcgcgccactgcgcagtggttcatcggcatggacaaagaaccgaccagcggcgacaccctgcgtgtccgctcgctcaaagccatcgaagacaccaagttcgtcccggcctggggccaggcgcgcctgcactcgatgatcgccaaccgccctgactggtgcatctcgcgccagcgtaactggggcgtgccgatcccgttcttcctgaacaaggaaagcggcgagctgcacccacgtaccgtcgaactgatggaacaagtggcccagcgtgtcgaacaggaaggcatcgaagcctggttcaagctggacgctgccgagttgctgggcgatgaagcgccgcagtacgacaagatcagcgacaccctcgacgtgtggttcgactcgggcactacgcactggcacgtgctgcgcggctcgcacccgatgggtcacgaaaccggcccgcgtgccgacctgtacctggaaggctcggaccaacaccgtggctggttccactcgtcgttgctgaccggttgcgccatcgacaaccacgcgccgtaccgcgaactgctgacccacggcttcaccgtcgacgagacaggccgcaagatgtccaagtcgctgaagaacgtgatcgagccgaaaaagatcaacgacaccctgggcgccgacatcatgcgtctgtgggtcgcgtcgaccgactactcgggtgaaatcgccgtgtcggaccagatcctggctcgcagcgccgatgcctaccgtcgtatccgtaataccgcgcgcttcctgctgtcgaacctgaccggtttcaacccggtcaccgacctcctgccggccgaggacatgctcgcgctggaccgttgggccgtggaccgtaccctgttgctgcaacgcgagttgcaggaaaactacggcgaataccgtttctggaacgtctattcgaagatccacaacttctgcgtgcaggagttgggtggtttctacctcgacatcatcaaggaccgccagtacaccaccggcaccaacagcaaggcgcgccgttcggcgcagaccgcgctgtatcacatcagcgaagcgctggtgcgctggatcgcaccgatcctggcgttcaccgccgacgaactgtgggaatacctgccgggcgagcgcaacgaatctgtgatgctcaacacctggtacgacggcctgaccgaactgccggccggcttcgaactgggccgcgagtactgggaaggcgtgatggccgtgaaggttgcggtgaacaaggagctggaagtacagcgtgcggccaaggccgtcggtggcaacctgcaagccgaggtcaccctgtttgccgaagacggtctcaccgccgacctggccaagctgagcaacgaactgcgcttcgtgctgatcacttctaccgcgagcctggcgccattcgcccaggccccggcggacgcggttgccaccgaagtgccgggcctcaagctcaaagtggtcaagtcggccttccctaagtgcgcccgttgctggcactgtcgtgaagacgttggcgtgaaccccgagcatccggaaatctgcggtcgttgcgtcgacaatatctcgggcgctggcgaggttcgccactatgcctaacgccagtcgtttcggacgtctgggctggctcgtactgagtgtgctggtcctggtcatcgaccaggtcagcaaggctcatttcgaaggctccctgcagatgttccagcaaatcgtggtgatcccggattacttcagctggaccctggcctacaacaccggcgccgccttcagcttcctggctgacagcggtggctggcagcgctggctgtttgctctgatcgccgtggtggtcagtgcggtgctggtggtgtggctcaagcgcctgggtcgcgatgacacctggctggccatcgccctggccctggtgttgggcggcgcgctcggcaacctgtatgaccgcattgccctgggccatgtgatcgacttcatcctggtgcattggcagaaccgccattacttcccggcgttcaacttcgccgacagcgccatcaccgtcggtgcaatcatgctggcgctggatatgttcaaaagcaagaaaaccggagagaccgtcaatgactgatcaggtattggctgagcaacgcatcggccagaacacggaagtcactttgcatttcgcactgcgcctggagaatggcgacacggtcgacagcacgttcgacaaagccccggccaccttcaaggtcggcgacggcaacctgctgccgggtttcgaagcggccctgttcggcttcaaggccggcgacaagcgcaccctgcagatcctgccggaaaacgcctttggccagcccaacccgcaaaacgtacagatcatcccgcgttcgcagttccaggacatggacctgtcggaaggcctgctggtgatcttcaacgatgcggcgaataccgaactgccgggtgtggtgaaaaccttcgatgacgcgcaagtgaccatcgacttcaaccacccgttggccggtaaaaccttgacctttgacgttgaaatcatcgacgttaaagcgctctgatcaacaacacacaattaaatgtgtgaagtgggcttgtgtgggagggggcttgcccccgatagcggtggaacagtcaggggtttgtttactgacccaccgccatcgggggcaagtcgaatcgtcgcaccgcccctccctcctttgatcttcattttcggttgggttagcgtcacaccagacccaaatagctgcaagacacgaggcacagcatgcaaatcaaactcgccaacccccgtggcttctgcgccggtgtggaccgggcgatcgaaatcgtcaaccgcgccctggaagtcttcgggccgccgatttacgtgcgtcatgaagtcgtccacaacaaattcgttgtcgaagacctgcgtgcacgtggcgccatctttgtcgaagagctcgaccaggtgccagacgatgtgatcgtcatcttcagcgcccacggtgtatcccaggcggtgcgtaccgaagcggcaggccgcggcctgaaagtcttcgatgctacctgcccactggtcaccaaggtgcacatagaagtcgcgcgctatagccgtgacgggcgcgagtgcatcctgatcggccacgccggccacccggaagtcgaaggcaccatggggcagtacgatgccagcaatggcggctccatttatctggtggaagacgaaaaggatgtcgccaacctgcaggtacagaaccccgagcgcctggcattcgtgacccagaccaccctgtccatggacgacaccagtcgcgtgatcgacgcgctgcgcagtcgcttcccggccattggcggcccgcgcaaggacgacatctgctacgccacccagaaccgccaggacgcggtcaagcaactggcagacgaatgcgatgtggtcctggtagtcggcagccccaacagttccaactccaaccgcttgcgtgagttggctgagcgcatggcgacgccagcgtacctgatcgacggtgccgaagacatgcagcgtagctggttcgatggcgtcgagcgtattggtatcacggcgggtgcttcggccccggaagtgctggtgcgcggtgttatccagcagttgcacgcctggggcgccaccggtgccgatgaactggctggccgcgaagagaacatcacgttctccatgcccaaggaactgcgggttcgctcgctgctgtaaaaaaccggcgtgccggatcaactccggcacaatgcctgctcggcacgctcgctgcgcaggctgatgcgcccgctgggtgccagcactacctgatacaggctctgcgcctggtccgcggcacacacatgcacggtgccggcacggaagcctccccctgaaaagatgggctcacccagcccgctgaagcgcacctggttcttgagcggcccattgcccacgatcggcgcttgcctgctggcctggtgctccaacagcaccgggttgtcatcgtccagggggccgcgcccgctgatgtccacgatgacccgccaccccaggccccaatcatccctcagtgcgtgaatgaccaccgcccggttgcgtgcgatggcttcggtgcgtgcataacgcaggccttgcgtcaaggactgtgctgcgctctgtcgctgctgtgactccagcaggctcttgaaactcggcaccgccaggttggccagaatgccgctcacgatcagccccagcagcagttcgatcaaggtgaaccctcgttgttgcatgtgccatccctccgtggatttgggtgtagtcctagttatagcgtcccgtctgtggtgcggatgatggccttcatgtccaaagtatttccctttgttccggttgcagcgcaggtgaaaaaccggcgctagtcttgggccgcacagcagggtttacctgctctttttcggacctcgacacggatgacgacggtaatgcttgcctgcacgaacacctgtttgcccaacgccttatcccgctaccaagccggtacgacactgatcgaagtgctggtcgcggtgttgattctcaccattggcctgctgggtgcggcggtgatccaactcaatgcgctcaagtacaccgacagttccaggatgaccagccaggccagtttcattgcctacgacttgctcgaccggatccgtgccaattctgctgccgactacacgtggggccgggccgagcgtgccttggccggcaatgttgccgccagtgcgcgcgacctggacttgcatgatttcgaggccaacattctcggttttgccggggagagcgccaaaggctcggtgtcgatcagtggcggcgaggtgacggtcagaatcagttgggatgacagtcgaggtacaggcaggccgggtgcccgggaaaccttcaccctgaccagtcgcatccgcgatgaaccgggagtggcgcaatgaggtgtcttgttcgaggtttcagcctggtggaggtgctgctagcgttggcgatggggctggtactggtgctctgggccagccaggtggcaattcagtccagggctactcatgccagccagcaggccgcgctgttgatgcaggatgatgcgcggtttgtgctgggcaagctgctccaggatatccgtcaggcgggcatgttcggctgtctggcgacagcgtttatcgacaacgccccgcccgcttttgaccggcctgtcgcttggcgtgtcggaggcggatcaacctcgctgacgctggtgaccgcggaggtcgccgttggaagcggcacgcctgactggactgtattgtccgattgcacaggcagcgcccacgcctacgcgggaagcgccccggcatcggcacccgggcaaatccgttttgcgttacgccaagttacctacaccttcgaagcagggcagttgaaagtcagtacgcctgcatcacccgccaaggcggtattggtggataacgtgaaggcattcgatatcagtttcggcgtgtccgccaaacctgcgtcaacggaagtggtgcgctacgacgccggcccggccgacgaatccttgatacgcagtgtgcgcattgtgatgacgctgcaagaccctaccgcccgggtgaaagatcaaacctacagcgtcgtggcggcgctgcggaaccgactggggtagggctaccatgatgcatttagagcgttttcgtctgcgacaggcgggcatggtgctgctggtcagcctggtgttgctgctgctgttatcgctgatcggcttatcctcgatgcaggctgcgctcactcagcaaaagattgccggtagtttctggcaccgtaatcagtcgctgcaaagtgccgagagtggcttgagattgggagaactccttgtaaggcgggcgtccgcaggcttgacgttgtgtcagtcaattgccacctgcgtgccgcccgctgaagcgttttcggttgtgggctccggaacccaccctgtctcgggcatcaagtgggtcgctctcaaaggcggggtttacggcattcagttcctgggccctgcggttgggctgacacatttaccggcacaaaccacggctgcggtgtatcgagtgacggcagtcgggctgcacgggcaattgcgcacggtgctggagagtacctatgcgcgggtagaagaggagggtggctcgcggtttcggcgagtggcatggcgacaacttcaataaggagtagtggaatgggcatggacagccagggttttaccctgatcgagttactgatcgccgtggtgatcattgcggttctggccgggattgcttaccccagttacaccggccatctgaaaaaagtctatcgcgctgaaatcgttgcgctgttgaccgagcaagcacaggacctggagcgcttttatgcgagaaacggcagttttattgatgcagccggcctcagtgcaggcaatgatcgctatagaatcaccgctgcattgaaccctcaggacttccaactggtggccacaccggtcgccgactcggtgatggctggcgatccttgcggggatttcggcctgaccggcgcgggcacgcggaccaacccgggcgctgcgccgcagatgtcgcgcaagctgtgctgggggcaatgatgagggtgctggatgattgggcgccgggtgcgcttgttcctatttatcggctggatcaaatgatggcagagcaacagcaggtagtgattgtcggtggcggagtcatcggcttgttgacggcgttcaacctcgcgacccaagggcaggcggtggtgttgctggagcgtgctggattgggacaggaatcctcctgggccggcggcggcatcgtttcgcccctgtatccgtggcgctacagcccggcggtcacggccctggctcattggtcccaggatttttatccacagctggcgcagcgtctgttcgctgcgacgggcgttgatccggaggttcacaccacgggcttgtactggctcgatctggatgacgaagccgaagccctttcttgggccgcgcgtgaaggccgtcccttgagcaaagtggacgtgtcggccgcccatgacgccgttccggtgctgggcggcggttattcccaggcgatctacatggccaacgttgccaatgtgcgaaacccgcgcctggtcaaatcgctcaaggcggcgctgctggcgctgcccggcgtgaccattcatgaacagtgtgaagtgactggttttgttctggatgcgggtaatgtcgtgggcgtgaacacagctgatgggtcgatctacggcgatcaggtcgtactggccgccggcgcctggagcggtgagctgctcggcacgttgggcctgtcgctgccggtcgagccggtaaaaggccagatgattctgtacaaatgcgcttcggacttcctgtcgagcatggtattagccaaggggcgttacgcgatccctcggcgggacgggcacatcctgatcggcagtaccctggaacatgaaggtttcgacaagacccccaccgaaaccgcgctggaaagcctcaaggcatcagcggtggagttgattcccgccctggcggacgccgaggtggtcggacattgggccggtctgcgccctggttcgcccgaaggcattccctacatcggtcgtgtgccgggtttcaatggcctgtggctcaactgcgggcattaccgcaacggcctggtgcttgcgccggcgtcctgccaattgtttgctgacttgctactggcgcgcgcaccgatcatcgacccggcgccgtatgcgccggaaggtcggctcaacgctggatagattttggcccttgctccaggtgcgcctgggtgcaataccactcctggcgagagctcagggcgcgatcctgcggcagatgcacgccgcagtgggcgcagcgcaccatcagggccgcgtcaggctcgctggcacgatgctgcctggcggctgggcttttgaatttgcgccagaaccatactgcggcggcaatgacggcaatccagaacagtagacgaagcatgatgggcagtttctcgacaaggaatgcgccagtttagccaaggacgtgccaggcgcacagcgcaataataccgcccacaaaaaaggagcctcgcaaggctccttcttgatgacgccggtgcaatcagtcaaatacaccgaaggtcatgtagctgaaccacgagcggtcctggttgttgcctagggcctgcggtgcttcttcttcgatcacgtcgccgttttcatcatgcggcttgaggtccgaagggatggcgtccttggcgtcctggtactgcttgatgacgtcctggttggcgcgggtttcgcccggcggcagcggtggacgggactcgatcaggcccaaggtgtacttgctcagccacgaacggttgtccgcttcggccacctgaggcacgaactggccgtctttcaggcttgggtggtccgggtagttgagcttcagggtttccaggctggtgctggccagttcgtccaggtgcaggcgctggtaagcctcggtcatcacggccaggccatcacccacggaaggggtttcctggaagttttccacaacatagcggccacggttggctgcggccacgtatgcctgacgggtcaggtagtagtgggccacgtggatctcgtaggacgccagcaggttgcgcaggtagatcatgcgctgcttggcgtcaggcgcgtagcggctgttggggtagcggctggtcaactgggcgaactcgttataggagtcgcgggcagcgcccgggtcacgcttggtcatgtccagcggcaggaagcgcgccagcaggccgacgtcctggtcgaacgaggtcaggcccttcatgtagtaggcgtagtcgacgttcgggtgctgcgggtgcaggcggataaaacgctcggcggcggacttggcggcttccggctcggcgttcttgtagttggcgtagatcagctcgagctgggcctggtcggcataacgcccgaacggatagcgcgactccagggccttcagcttcgctgtggcgctggtgtagctattattgtccaagtctttctgagccagttggtacaactcgacttcgctcaggttttcgtcgacgacttcctttgttgacgagcaagcagcagtcatggcgaggatggcgatcagcagcaggtgtttcacttgcatggcggcttgcgtccctatgacggccgctgtcttgggcggggccgtcctgttatgatgagcgccccgttgaaagcctcggggcaaaagacgccgtatttaaccacaagcgcgcagccgaaaccaaaggctgtgccacgcctagtctgagcatgtccgataaaattgaacttcgcgcagaggtgccgtccgaattgggcggccaacgcctcgatcaagtcgccgcacaattattcgctgagcactcgcgctcgcgcctttccgcctggatcaaagacggccgcctgactgtggatggggcggttatccgcccgcgagacatagtccatggcggtgcgattcttgagctgactgccgagcaggaagcccagggagaatgggtcgcccaggacatcgagttggatatcgtctatgaagacgacgacatcctggtcatcaacaaacccgcaggcctggtggttcacccggccgccgggcacgctgatggcacgttgctcaatgccttgttgcaccatgtgccggacatcatcaatgtcccgcgttgtggcatcgtgcaccgcttggacaaggacaccaccggtctgatggtggtggccaagaccattcaggcgcagacgcagctggttacacagttgcagagccgcagcgtcagccggatctacgaatgcatcgtgattggtgtggtggtagccggcggcaagatcaacgccccgatcggtcgtcacggccagcaacgccagcgcatggcggtgatggaaggtggcaagcaggccgtcagccattaccgagtactcgaacgtttccgctcccacacccacgtgcgggtcaagctcgaaaccggccgtactcaccagattcgcgtgcacatggcacacatcaacttcccgttggtcggtgatccggcctacggcggtcgcttccgcattccaccggcggcgagccagaccatggttgaatcgctgaaaaacttcccgcgccaggcattgcatgcacgcttcctggaactggatcatccgacgagcggtaagcggatgagctgggaatcgcctctgccggacgatctggtctggttgttgacgctgctcaagcaggatcgcgaggcgtttgtcggatgagtgactggctgatacctgactggcccgcgccggctcaggtgaaagcctgcgtcaccactcgagcgggcggcgtcagtctggcgccgttcgacagcttcaacctgggcgatcatgttgaggataatcttgacgcggtcctcgaaaaccgccgccgtcttaccggcgcgttcaatattcagtctgcctggttgcgccaagtccacggggtaactgtggtcgaggctgacccgtcacgcattgccgaagctgatggcagctggaccagcacccctggcatcgcctgcacctcaatgaccgccgattgcctgcccgcgttgttctgcaaccgcgctggcacccgcgtggctgcagcccatgctggctggcgcggcctggcggcgggggtgctggaagcggctttcgaaagcctcggcgccgaacctgaagacgtgctggtctggctcggcccggcgattggcccacaagccttcgaagtcggcccggaagtacgcgaagccttcatgcagccgttgccgctcactgccgaagcgttcgtgccgagccacaacccaggcaagttcatggccgacatctataagctcgcgcgcctgcgcctcgctgcgcgcggcgttaatgctatctatggtggcgggtactgtacggtgaccgacccgcgcttcttttcctaccggcgcagcccccgcaccggacgttttgcctcccttgtgtggcttgaacgctagactcccttgatctgggtcaaacccggtccatatccgccatcgcgtgcttgaatcttccagaatccaccccatctataagggtatctggcaggtttcttcattcaggatgttttatagctccggcctgctcaaaaggaaggtgactaatgcgtattgatcgtttaaccagcaaattacagttggcattgtctgactctcaatccttggcggtgggcctcgaccacccggccatcgagcctgcgcacttgatgcaggcgctcctggaacagcaaggtggttctatcaagcccttgctgatgcaggtgggctttgacgtcaacagcctgcgcaaggaactgagcaaagagctcgaccagctgccgaaaatccaaaacccgaccggcgacgtgaatatgtcccaggacctggcgcgcctgctcaaccaggcggaccgtctggcccagcagaagggcgaccagttcatctccagtgagctggtgctgctcgccgccatggacgagaacagcaagctcggcaagttgttgctcggtcaaggcgtgagcaagaaagccctggaaaacgccatcaacaacctgcgtggcggcgacgcggtgaacgaccccaaccatgaggagtcgcgccaggccctggataaatacaccgtcgacctgaccaagcgcgccgaagagggcaagcttgatccggtgattggccgtgacgatgaaatccgtcgcaccatccaggtcctgcagcgtcgcaccaagaacaacccggtgctcatcggtgagcccggcgtgggtaaaaccgcgattgccgaaggtttggcccagcgcatcatcaatggtgaagtgccggatggccttaaaggcaagcgcctgctgtccctggacatggggtctttgatcgccggtgccaagttccgtggcgagttcgaggagcgcctgaaatccctgcttaatgagctgtcgaagcaggaagggcagatcattctgtttatcgacgaactgcacaccatggtcggcgccggtaaaggcgagggctccatggatgccggcaacatgctcaagccggccctggcgcggggtgagttgcactgcgtcggtgctaccacgctcaacgaatatcgccagtacatagaaaaggacgcggcccttgagcgtcgtttccagaaagtactggtggaagagccgagcgaagaagacaccatcgcaatcctgcgcggcctgaaagagcgttatgaggtccaccacaaggtggcgatcaccgacggtgcgatcattgcggcggccaagttgagccatcgctatatcaccgaccgtcagttgcccgacaaggccattgacctgatcgacgaagcggccagccgcatccgcatggagatcgactccaagccggaagtgctcgatcgcctggatcgacgcctgattcaactgaaagttgagtcccaggccctgaagaaagaagaagacgacgcggcgaagaaacgcctggaaaaactccaggaggaaatcgtccgcctggaacgcgagtattcggacctggaagaaatctggacctcggaaaaagccgaagtgcagggctctgcgcagatccagcaaaagatcgagcagtcgcgccaggaactggaagcggcacgtcgtaaaggcgacctgaaccgcatggccgagttgcagtacggggtgatcccggacctggaacgcagcctgcagatggtcgaccagcatggccacagcgagaaccagctgctgcgcagcaaagtgaccgaggaagaaattgccgaagtcgtctccaagtggaccggcatccccgtgtcgaaaatgctcgaaggcgagcgcgacaagctgctgaagatggaaagcctgttgcaccaacgcgtgatcggccaggaagaggccgtggtggcggtgtccaacgcggtacggcgttcgcgggctgggttgtccgacccgaaccgtccgagtggctcgttcatgttcctcggcccgaccggcgtgggtaagaccgagctgtgcaaggccctggccgagttcctcttcgataccgaagaggccatggtgcggatcgatatgtccgaattcatggagaaacactcggtggctcgcttgatcggtgctccaccaggctacgtgggctacgaggagggcggttacctgaccgaagccgtgcgccgtaagccctactcggtgatcctgctggatgaggtcgagaaggcgcatccggatgtgttcaacatcctgttgcaggtgctggaagacggccgactgacggacagtcacgggcgtaccgtggatttccgtaatacggtgatcgtgatgacctccaacctgggctcggcgcagatccaggagctggtgggtgatcgtgaagcgcaacgtgcggctgtcatggatgcactgacttcgcacttccgcccggaattcatcaaccgggtcgacgaagtggtgatcttcgagccgttggcgcgggatcagatcgcaggcattaccgagatccagctgggtcgcctgcgtggccgtctggcggagcgcgagttgtccctggacctgagccaggaggcgttggacaagctgatcgcggtgggttacgacccggtgtatggcgcacggcctttgaagcgtgcgatccagcgctggatcgagaacccgctggcccagctcatcctgtcgggcagcttcatgccgggcaccagcgtcgaggcgaccgtggaaaacgacgagatcgtcttccactaagcccaaagggcaaagcaaaaatgaaaggccccgcattgcggggccttttttttcgatagggcgttgaactgtaaggcaaaggcttgtaaagtgcgccccgcagcaacgtcagcccacgggtttcttctccccaagaagaaatcagaaacaagcgcaaatcattgtcttaaaagcaatttaaagggttgacaggggtttttaagattgtagaatagcgcgcctcagagacatgaacgtagcgatacgaacaagtcgaagagaaggtagtaagcagtaacgtagtactttgaaatatgtagttccgtgatagctcagtcggtagagcaaatgactgttaatcattgggtcccaggttcgagtcctggtcacggagccaatttcaatatcggggtatagcgcagtccggtagcgcgcctgctttgggagcaggatgtcgggagttcgaatccccctaccccgaccatatttgggtcgttagctcagttggtagagcagttggcttttaaccaattggtcgtaggttcgaatcccacacgacccaccatttttgagaccagttaacactggaatcgaatcttaagatcagaggccaaaagcactgatcgaagaaggcgactgaaaggtcgccttttttttaccggggtatagcgcagtccggtagcgcgcctgctttgggagcaggatgtcaggagttcgaatccccttaccccgaccatattaaaaatcctcgtatcgaaagatacggggattttttttgtgcgtgaaaaactcaagtccggtgaaaatcgaatgtgggagggggcttgcccccgatggcagtgtgtcagtcgacaaatcaatgactgcttcaccgcaatcgggggcaagccccctcccacatttattgagtggcctcaggggccgagttgtcagtgaagtttgagtcgcggctcggtcccacgcccaatcttgctgcccagcatcagcatcgccgtacggaagaacccatacagcgccatctggtgcatgcggtacagcgacacatagaacatccgcgccagccagccttccagcatcacgctgccggtgaggttgcccatcaagttacccaccgccgagaaccgcgacagcgagatcaacgagccgtagtcagtgtatttgtaagaaggcaggtccttgccttcgatacgcagcttcagcgacttggccagcaacgaggcctgctggtgagccgcctgggcccgtggggggacgttgcggtcggtgcccggttgtgggcaggcggcgcagtcgccgaaggcgaagatgttctcgtcgcgggtggtttgcagcgtcggcaatacctgcagttggttgatgcggttggtttccaggccatcgatgtccttgaggaagcccggcgcgcgaatgccggcggcccataccttgaggctggccgggatcacttggccactgctggtgatcagcgcatcggccgtcacttcgctgaccgccgagttggtcagtaccgtcactccaagcttctccagggttttatgcacaggcccgccgatacgctccggcagggccggcagtacacgtgggccggcttcgatcagggtgatgtgcatgttttccggcttgatacggtccaggccataggccgccagctcgtgggcggcgttatgcagctcggcggccagctcgaccccggtagcgccagcgccgacgatggcgacgctgattttttccaccacgtcagtctgcccggcatgggcgcgcaggtagtggttgagcaactgctggtggaagcgttcggcctgcttgcgggtgtcgaggaacaggcagtgctgcgccgcaccttcggtgccgaagtcgttggtggtgctgccgaccgcaatcaccaggctgtcatagcccagcacgcgcgcgggcaccagttcacggccttcttcgtcgagggtggcggccagctggatcttcttctgttcacgatcaagcccgctcatgcgccccagttggaactcgaagtggttccatttggcctgggcgacataattgagttcgtcttccgaagagttcaacgagccggccgccacttcgtgcagcagtggcttccagatatgggtcaggttggtgtccaccagcgtgatgctggcagtgccgcgcttgcctagagtcttacccaggcgggtagccaactccaggccgccggcgccgccgccgacgataataatacgatgggtcatggggatatctcgcaaggctaaaagaaatcggagcagttacccccgcgagcgccaggcagctcatagcgtcaggtaactcaaaaggcgactcagcaagccgaggccgatcaccacggcaagcaccacgccgaggagcagccacggccggaaaggcttgcgctcgactcggttctgggagagttgcaggtactcttcgacatgctgttggtcatcggggttcaggcggctggtcataaaggcctcgtcaggtagacgttgcaaaagggcgccacgttacagtcctggggctcagaggctgatacccacgtcgaacactatgctgcggcccaggttgttgcgcaagaaatccggtgcgtccgggtgggcgaacagcacccgtgcaaaggtcggccctaccagggacaacgagcgccagccctggcgcagatattccgtcggcggcggaaaatggctgttgaggtcgagcacttcgcgcttgaggctagtgaaggcgacgatatccagctcacccaggtccatcccgcgctctttatagttatgcgccttcttgcgcagcgtaggcgccaggcgcatcagaaactcgtgggccgggatgcgtcgcggcttggcttcgcgtcgtaccagttgactgagggagaacgcactgcgccggcgcagcaactcgtcgcgccactcgtcattcaggcgacggccctcgtccagcacgaaaaacacctcgaagctggcgtcgcgaaacagtacgtccggcggctcttgcccggcggcgtggaattcttcggcacggtagggcacgttcaagccttgcagcagacgctggcagacccaacgctcacgctcccatttgcgggcattggacaagaacgcattggcttgttcggccgctacggtgagcaggcgcaagtaatctgagtcatccatagcaagcagcttagcgcccaaatgatgaccgcaggaagtaccccggtgaaacgtcggtgtagactgatcatccgactcttattcgacccggggagtatcgccgtgatcagtgccgccctgttggcgccgacaaccatgggtctcggctggttgctgtatgcgccgctggtactgtgggcgatcctgcgttcgccgtgggtcgagctgttcgccgaccggcgccgtcagcatttgttgttcggcacggtgttcgcgttgttcatgctgtggctggtgcggcgggattttgataccggcgtgtcctaccacttcatcggcatgacggccgtaaccctgttgctggattggcccctggcaatcgtcggcggttttgccgcccagttgggcttgctgctgttggggcgccaggatctcgctgcccttggcctcaatggcctgttgctgatcgggctaccggtgctggtcactgaagcctgcgcgctgctggtcgagcgtgcgcaaccacgcaatccctttgtgtatatcttctgttccggttttttcgcggcagccctgtcggcactgttgtgcctgctgtgtgggctggggctgttgtggttcgacgggcgtttcgccatgccggaatggctggcggattttgtcggctacctgtggctgatcatcttccccgaggcctttatcaacggcatggtcatcagtgccctggtggtgttttgccctgaatggctggagaccttcaaccgcacgcgctacctctcggcgccttggaaggacgacgattcgcagcgttgacctggatcaaatcccgcgtcgacgagcaggcccatgctctgcgaaatttttccgggagcgcggatcatgagtgtgtacgaatgggcacggcaggagttacgcagaagccaggacgcggcacaggagatcggttttgacccaggactgactttgcgcgccatgctcagcgcggtggtgcaacagagcaaaggcgtgcgcagtttcgaagacttggccgacgagctgcaatacctcgcagaaaacctcgacgaccagcaggaatatgcctttatgcgcccttaatggcgcggcggcaggtcttcggaaaacagctcgtcttcggcatccggcgccacggggatcttgtgttcttcagcggcccaggcgcccaggtcgatgagtttgcagcggtccgaacagaacggccggttgaggttggtcgctttccattccacgggtgcgccgcaggttgggcagtcgacggtcaagggttggctcatgatcggcctccacgcaaagtaaggtaaaagtggtgcagtcgctcgacctcgctgtgcagccaggcaaggtcctgatcattgaccagtacgtcatcggcatgtttcaggcggtcttcgcggctcgattgggccttgaggatcgcctgcacctgttgttcgttgatgccgtcgcgctgcagggtacgctgaatctgcagcgattgcggcacatcgatcaccaggatgcgctgggtcatgctgtactggccggactcgatcagcagtggcgacaccaggatcgcgtaaggtgacgtcgcgcgcgccaggtggctgcggatctcctcgccaatcaacgggtgcagcagggcttcgagccagcgccgctcttcgggcacttcaaagatcagcttgcgcaatgcggcgcggtccaactggccgtctggctgcagcacgccggcaccgaaatgctcggcgatgtgcgccaatgctggccgaccaggctctaccacccagcgggcggcgtgatcggcgtccaccaggtcgatacccaggtcgataaagtgctgggccgccgcgcttttgccgctgccgatgccgccggtaaggccgagaatccagggtgttgcaacacgagtggtcatctgaaaccgacagactgcaaatagaagtcggttatttgaccaccccagagcaatgcaatccagccggcaatcgccagatacggaccaaatggcatcggtgccgacgcctgggacttgcgcaggcgcatcaggatcaagccggcgaataccccgaccagtgacgacatcaacagcgtcatcggcaggatctgccagccaccccaggcgcctagcagcgccagcaacttgaagtcgccgtggcccatgccgtccttgccggtgaccagcttgaatagccagaacacgctccacaggctcatgtatccgatcacggcgccccacagggcgtcggccaatgtcgtcagcaggccgaaactgttgacgatcagtcccagccacagcagtggcattaccagcacatccggcagcagttgatggtcggcgtcgatcaggctcatcgccaacaatccccagctcagcaccatcaccgttcccgcctgccagccaaagccgaaatgccaggccacccaggccgagatcaaagcgcatgccagttccgtgagggggtagcggatgctgatcgccccttggcaatgcgcgcagcggccgcgcagaaacaggtagctgagcagcgggatattttcccatgggcgtatgggatggttgcagcgcgggcagcaggagttgggctgcatcaggttgtaggtcggcccggctggttctgcgggcaagtccagcacttcatgggcctgggcgcgccattcccgctcgagcattttcggcaggcgccacaccagcacgttgagaaaactgccgacgatcagccccagcaccgccgccatcgccacaaacgcccagggatgctcccccagcagcaggctcaaaatgcgcttcccagttggaataccggcaggtacatggcaatcaccagcgcgccgacgatgccccccagtaccaccatgatcagaggctccatcaggctggtgaggtgatcgaccagggtgtccacatcggcctcgtaatggttggcgaccttctccagcatgcggtcaagcgtgcccgactcttcgccgatggccgtcatctggatggccatgccgggaaacagaccgctgacggccatcgattgattcagttgcatgccagtggatacatcgtgtcgcatatgctcgattgcctgtctgaacggcccagaaccggcggccccggccaccgagtccagcgcctgcaccaacggaacaccggcggcgaaggtagtggacagcgtgcgggcgtagcgggccacggccgattttctcagcagtttgcctgccaggggcgctttcaacaaaccggcatccagccacagccgaaaagccggtaaggcatggtaggcgtggcgcaacccaaaacctgcggcaagcaggcccagtgccacgccccaccaggctcgctgcatgaactcggacaaagcgatcacctgcaaggtgaagccgggcagtttgccgtcgactccggcgaacaggctttggaactgcggtactacgtggaccagcagcacgccggtgaccaggctggcgaccatcagcacggtgatcggataggtcatggcttttttgatcctggcctttaactgctcgctcttttcccgatgaatcgctacgcgctccagcaaggtttcaagagcaccggcctgttcgccggctgctaccaggttgcaatacaactcatcgaaatagcgtggatgcttgcgcaacgtgtcggcaaggctggtgcctgcggcgatggactgtttcaacccctctgtcagttcacgcagcgtgcggttgtcaaagccttcgccgatgatgtcgaaggcttgcagcagaggaatcccggccttcagcaaggtggccagttggcgcgtgagcagggtgatatccgccgatttgatagatggcttgaggcccgctagaactggagaatgcttgcgtacaagccctgggctgatgccttgccggcgcagctgagccttgaccagggctgggttgtgcccggcgctgtgcccggacaccctgcgccctttgcggttgatgccttcccaggcgtagatcgttgaagcgttgtccatgtcaccgttccgcacagaggtcgttgaagatttatagcttagtcaggtgacggattcgggcaggcgggcggtggtggataaaatgtcagaatgtgcgtcttgtgcgcgattgaccgcctgcggatgagtacactggcgccgctgcacaactcggggcgcaggaagcgccttgtcatgagttctatcctggagagtgaatgtgagacgtcaaaaaggttttaccctgatcgagctgctgattgtcgtggcaatcatcggcattttggccaccatcggcctgcccatgtacaccacccaccaggccaaggccaagttcaccgccggcctggctgaaatcaccgcgttgaagcccgggtatgaagacaccctcaaccaggggaccgtgccgaccttggcattgatcggcggcaccagccccaccgccaattgcaagatcgaagtggcaggcgatgtgaccaccggcgcgggcaccatcagttgcgaaatactcgacgcacctgcgccggtgctgggcaagaccatcagcctgacgcgcaacgccaccaccggttggaaatgcagcaccaccgctgaagccaaatatgttgccaagggctgcggcgccgacggggcatagctgctaaaccaaccacaggtaacttgaggtggccgatggcgttatccatacagcagcgtggcagtgttttcctggtgacagtggtgtgcctgctggtagtcggaatatgtgcacccttcagtgggcatgatctgcagcgggctatgcagattgccatcggggcgtgtgcggtgctgtatgggttatctgtcgtccctgtcggccaattgctggacaggccaaccgccctgggcctgatgctgattatcgtgcttggcctggtgtcttccacgttggcccatcagccgctctgggcactggccgaaatggcgctgtttgtcagttgcgggtcgattgccgtggcatttgccttgctgcgtcgtcatggcggcgagcctttggatcgcgccttggtcatggtggtggtgctgctgtgcctgatcaagtcgattcaatacctgtatgcgggcgcacttgtgttcatcaacgctgaacgtgtgctggaccctgacctgttgctgtccggtttttccaacaagcgcttctacggccagtttcagacattcacgctgccgttgctggcacttcctttgttaatcactgttacctctcgctcgctcaaaggcgcggtgtttgcgttgctgtgcgtgtggtggatgattgcgatcgccggtggtacgcgcggtacctggcttggcatgtgtgtggccggggctgtgctggcggtacttggcccctgggggcgacgatggctgggttggcaactggcggcagtgtttggcgggctgctgctgtactggctggtgtttgcgttaggggcggattacctggaagtcgaggtctccaagggcgccagtgaccgcctcaccaccaccctgtcgggtcgtggtccgatctggtggcaggcttggcatatgctcatcgagcgtccatggttgggcttcgggccgatgcattttgccgatattgccaatgaaatcgccgctcacccgcaccaggccatcctgcaatgggccagtgaatggggtgtgccatcggccttgtgcgtgatggctctggcgtggcgaggcggctgggcgacgttcggtgtgttgcgcgaacgagcgctctcgaacactcgcgctgatctgttgcggctatgcctgtttgcggccttggtaggggcgttggtgcagtccatggtcgacggtgtgatggtgatgcccaattcccaggtctggctggcgctggtggtgggctggctgatggcgttgcatgtgtggaaaaccccggaggccgccgcgttgccattggcctgggcagcctggaaagtgctgagtgtgctggccgtcggtctgctggtttttatcgcagctcgcgatgtgcctcacatcaagcaagcccagcagcagtacctgagcactcatgtcggcctgctgcaaccccgtttctgggcccagggcgtgattgcgcgctgaaggccgcaagttgccggacttccaatgcagtgctagctttagcccaccgcccgtgtagctcagccggtagagcagcgcactcgtaacgcgaaggtcgcaggttcgattcctgtctcgggcaaaaaggcaccatggcaacaccgttttcagatgatcccagaatggttctgaaggccagacgagccggcatttgagcctgctcttttgtatctgcgcaaccttgatgacccagatgcatccccattcctcgatctaagagaacaacatgaccacgactgaaatgacccaggaagttcggcatcaagcagccctcgaaaaatacctcgaggaatcgccgcagcttaaagaagagatcaaggacctgagcgccgatgatcagcgcgaccagattcagtgggcattcgaggacgaagccgagagccagggctatcagccttgggagctgaccctcaagtacacctcgacaccggaagaattcgaagcggcacgactggccttgcacaaagaggcggccgaagtgctgggtgtcgaatgggaagagtactgcgagatgaatgacctggtagtttagaagcagctgccagactcaagctgcaagctgcaagctgcaagttgtctcgcgtccctcttgcagcttgaagcctaatacttgcagctccttagatactcaggcgcatcgacaaatccaccgccttcacatccttggtcatcgcaccaatcgagatgtagtccaccccggtctcagcgatcggcaacagggtgttttcgttgatcccgccgctggcttccagcttggccttgccgccattgaggcgcacggcttcacgcatgtcttccaggctcaactcatccagcatgacgatgtccgcgtcagcggccagggcttcgcgcagttcatccagactttccacttcgatttccaccggcttgccgggagcaatccggtgcgcggccgcaatcgcctgggcaatgccaccgctggcagcaatatggttttccttgatcaggaacgcgtcatacaaaccgatacggtggttgtgacagccgccgcaggtcactgcgtacttctgcgccaggcgcaggcccggcagggttttgcgggtatccagcagcttgacctgggtgctggaaacaaagtccgccagaaattgggcacgcgtggcgacgccggacagcagttgcaggaaattcagtgcgcagcgttcgccgctgagcagcgagcgcgccgggccttcaaggtgaaatagcacttggttggggctgacacgttcaccatcggccacttgccaatgcacggcgacccgtgggtccagctggcggaacaccgcatccacccaggcggtgccggcgatcactgctgcatcgcgggtgatgatggtggccgtggccagccgttcggccgggatcaactgcgcagtgatgtcgccgctgccgatgtcttccagcagtgcgcggcgcacgttggcttcgatttcggcggtgaggtcggcaagacggagattcggcataacaggctccacagacaaagtgccccgattataggggcagtgcgcgtctgaacccagcgacctgctcatttaccgccaaatgacagagtgtgctggcgcaaacccccttgtttgcaagataatctcgcgccttgcaattggcgtcatagctttgacgtctcgctaaataccgccgtttcaggaggccaggatgcacaatgacggaaaggtggtgccaatcaagaaggcgcatgccacgccatcgccgctcgcccgactgccggtggtgttgctgcaggttcgcgacagagcggcgcaacagttgcagcaagggttgcaggaactgttcgataacgccgacgacacgctgttcgaaatggccgacaaggcgcgcaacaatcttgaccaccacattttctttgaagccatgcgtgatctgcgcctcaagcgcaagaatttcgagcgtgtgttcatggagcgtcttttcgacgcctttgccagtctgggccaggcagggcggggcgagctgcaactggtgccggtggtttcctacgacggggtgccgggttcaaccagggacgacctggaaaaagccgtggcgcttgaagccatgctgggtcgcgtgcgccaccgtgacggcctggctctcgcgcaacttacggcacgcttgagcgccttactgggcaaccgcctggatgatcgtgagaaccctctggggccggcgctgctgtgtgagtttttcctgcgggcggggcgcagcctgggcgtggagatccgcgtcaaactggtcatgctcaagctctttgaaaaatatgtgctcagtgacgccgaccagctatacggcgaagcgaatcaattgctggtcgcaaccggcgtcttgcctgaactcaagaccataccgtcccgacgcatcgatggacgtgtggcacctgagcatccgcgcgaagctacttcgccagtccccgaccggtccggtgacgaaaatggccaggaagccttcgccgcgcttcaaccgctgctcacggcggtgcgtggcagcgtggcgccgacgcttgaggccagcgccgagccgttgcctatttccacccaggacctgctgcgcctgctctcccatttgcagcagtacgtgccggagcctgagtcggaggacgatttcgacctgcgcagccagcttgaacagttgctcacccgtgtcagcgtcaagagtggtaagtcgcgggtggtggaggacgcggacgaagacgtgatcaatctggtcgcgctgctgtttgagttcatcctcaatgaccgtagcgtgcccgatgccttcaaggccttgatcggccgcttgcagattcccctgctgaaagtggcgttgctggacaagagtgttttcagtcgcagtggccacccggcgcgggggctgctcaatgaaatctcggccgccgccatgggctgcagcccgctggatgactaccaacgcgaccatctttacctgcgcatcgagcaggtggtgcagcgcttgctcaacgaatatgtcgaagatccggcgatcttttcccagttgctcgccgagttcagcgcgtttaccgccgacgagcggcggcgcagcgacttgctcgaacaacacacccgggatgccgaagccgggcgcgtgcgcactgaagccgcccgccagcgcgtggccgatgtgctgaataaacggctgttgggcaaagtcctgccgcgtcctgtggtgcagttcctgcaacaggcctggagccaagtgttgctgttggcgagcctcaagcacggcgagcagtcagtgcaatggcaagcggggctgcgcaccatggacgaactgatctggagcgtcggcctgcagcaggacaccgaggccgggcggcgtttgctggaccagctaccaggcttgctcaaggccttgcgcgacggcttgaccagtgccgcgttcgaccccttcagcacccgcgaattttttgtgcgcttgcaggcgttgcatatccaggcgcctgaaggtgttgatgagctgatcgaggtgcgtgagccatttgtgctgagtacggcgtcacccgacccggtcaccgagctgtcgggtaacgaccctgacctgtacaaggctctccaacttaaagtgggcgactgggtagtattccaggaaggccaggccagcacgctgcgctgcaagctgacagcgatcatggcgccggccaacacttatgtgttcatcagccgcacggggctcaaggtattggagaagagtgccggtcaattggcaatggcgttcaagtgtggcgcactgcaaacgctggaagacgggccattgttcgagcgtgccctgacggccgtggtgggcaaactgcatcaactcaatcgcggcaagtgatcgcaaccggagggtcgaacgcggcatactggtcacactttgtattgttcaaggaacctgtatgcagttggaccccaccagcggttggtgccggggcatccatcattgcccttcgcccaacttcaacgagcgccccgccggcgaaatctcactgttggtggtgcataacatcagcctgccaccggcgcagttcgccactggcaaagtgcaggaatttttccagaaccgcctggatgtcacggaacatccctactttgaagggattgccgacctacgggtatctgcgcattttctgattgagcgtgatggcgcggtgacgcagtttgtgtcctgcatcgaccgtgcctggcacgccggggtgtcgtatttcgaggggcgcgacacctgcaatgatttttccgtcgggatagagctggagggcacggatgacctgccgttcaccgacgctcaatatgcagcactgatcgacctgacccgccagttgctggtggcttacccaagcatcaccccccagcgcatttgtggccacagcgatatcgctccgggacgcaagaccgaccccggccccgcttttgattggacgcgctttcgcagcgccctgcaggatggagaacacgcacgatgagtttcctggtgttggtgctggctgtatggatcgagaagttttcggccctgcgccagcggttgcagcgagatggcggttggttgcgcgaactggccaagctggaatcgagcccgcgcatgggcaagcagccctggctgattctgacgttgctggtgttgttgccggtggccttgctggcgctgttgctgctggtgctggagccggtggcgtacggactgctggcgctaccggtgcacctgctggtggtgatctacagcctggggcgtggtgacctgctcgctgggctaggtccgttccgcgatgcctggcgacgcggtgacctgcaggccgccgagcatgtggccgaacgtgacctgagcctgagcgccgacagtggcgagcaattgctcgaacgcgttcagggccatctgttgtggcaggcctaccagagcttttttgcggtgattttctggtacttcctgctgggcccggttgccgctctggcttatcggctgctcgcactggccagtgagcacagcaagaaccccttggtggccgagcgggccgggcaactgcgccacgcgttcgattggctgccggttcgcctgctggcggccagctttgcgctggtcggcaatttcgttgccgtcagccgtgtgatgctccatgagctgctgagctgggacatcagcgccgcccagctggtggaaaaagtcggcctggtcgccgccgaaatcccaccccctgcggtcggccccgatggcatcaacagcctcgaccgactctgggaactgctgctgcgcgcagcggtgttgtggtacgccggcttcgccatctggaccgtcctaccctgaccctgtagaagccggctcgccgtagtgagcagtcttgcctgtggcgagcgggcttgccccgcgctgggctgcgaagcagccccccccatccattaaccttaagttacaaaactccctttcaaattgagctatacagatgctggctaactgccgccctgcacctcaataaaaataaaagaaagggagttcacctgtgaagagcttgctctatcccgccgtcgccctgatgaatcgcctgagcttcggcatgaagttcagcctgatcagtgtgttgttcctgctgccgatgctggcgaccaactcttatctggtgcgtgactcgtggcgtgaattccaaggcacccgcgtggaactgcaaagcctcgatttacttggcagcagcctgaccctgcgccgcgacctggaaaccctcaacaaccaggtgcagatcaacgccaccctcggccagtccggcaaggccggcgatcttgaaggcaagatcagcgccctggaacaaagcgtgctcaaccgcctgcaaggtctcaacgccatggctaccgagcctgagcagattgcggtttttgatgctaagcgtgaggagttgatcgcagccttcaagacccagcaacaggaaacgtcgctgctgagcaaaagcgcgctgatcggcaagttgctcaacaaatcgcagatgctcagccagatcatcgccagccaatccgggctgagccgcgactcccagagcgacctgcgccaactcagcgagctgatcaccagcgtcaccccgcaagtcacccaggccctgggccaaggccgggcgatgggtgcgtattccctgggccagggctttctcaattcttcgtccagcacgcggtttgacgagcttttgcagcaactggaaaaactccaggccgaatatggcctgaagttgcaggatgccctgggctccagcaccgcagcccacgcggcactcgacaacctggccaaagccagcaacgccagcctcaagcatggcagtgagttgtttgaggagcaggtggtgatggccgagaccctcgacgcaccctggcagggtttttacgacagcgtcagccagttgatggcccagacctatcagttggatgacgcgaccctggcgttcctcgggcagcagttggagcaacgcctggcgcaaaaccgcacgcacatggtggtactggtctcggccctgagcgcggtgtttttgttgatcttctatttgtacgccggtttctacgcgtccacccgcaccacgctgcgacgcctgggcgcgatgatggacaaggtggcagccggcgacatgaccgtcacttttgttgcacatagtcgcgacgagttgggcgacctgggccaggtgttcaacggcaccgtggcgaagatccatgacctgatcgagcgcgtcgggcacaccgtcagccaggtcgagctccaggccggccaggtggaaacagtctcggcccaaagcaaccaggccgtgtccgggcagcgtagtcagatcgagcaggtggccacggccatgaaccagatgtcgtccaccgcccaggaagttgcgcgcagtgcggcggcggccgtcagcagtgcccacagcgtcaatgacgaaactgtcagcggccgtggcctggtgcaatcccagcagggcagcattgcgcggctggcttcggaaatcgatcagtcggtgcaggttatcaaccaattggctaccgacagccagtccatcagcagcgtcctggaggtgatcaaaagcattgccgagcaaaccaacctgctggcactcaatgccgccatcgaagccgcgcgggccggtgaacaggggcgtggttttgcggtggtggccgacgaagtgcgcactctggcccggcgtactcagcattccaccgaagaaatcgaacagatgatcagccgcctgcacagcggtgtggccgccgccgtgaaggccatgggtaccagccatgccatggccaatggcacggtagggcaatcggaaaaggtccagcaggccttggaaaatattctcggtgccgtgggaatgatcgtcgaccagaaccagcagatcgctgccgccgtggagcaacagaccgccgttgcccatgacattgaccagaacatcgtcgaaatcaatcgcgccggcgagcatgcggcccagggcgcccaccagaccgaagcggcgagccggcagctgtcgatgcaggtgattgagttgaggcaattgatcggcgcgtttcgagtgtaggaattgtaggtagggcgtattgcttacgggtgtagtgcttgtcctgatttccctgcgtgtcttttctggcggcgtgaatgggtgagaatttgtttcagacaaattcacgttcaggggagcacgacgatgaccattgcagtcggcatcaaagggcattgcgcccattgtgatatcaggtttgagctcaagccctggcagctgaatgccatcgccatcgaagagcccttcgattgcccgtattgccggcagttcttgcaattgagttgccctcggcaattgcgggcgttcaagctgttgggccattgggcgctggtgcagccgagcatggcggtgttcacctgcatggtgctgatcgtggccctggtcacggaatgggtggggctgatcacggtgatcgggcagttcaacgtgtcactggtggtgctgctggtgcatttcctggcgctgcgctatgcccgttaccggcagcggatcacgttggacctgcaagtggtcacgccagtcttaccaattgaacagctcgcacgcattgcgtgtgctcgcctcagccaacgatagcgcgctgatgcccatgcgctcggccagggcggtgcagatggccggcaggtgttcggggctgttgcgttggccggggaacatggccggcgccatatccggtgagtcggtttccagcaccaccgattccagcggcagttgcgccagcaccttgtgcatgcgcaaggcctggggccaggtgggggcgccgcccaaccccagtttgaagccgagcttgatgtactcccgagcctcttcgtggctgccggcaaacgcatggatgatgccgccgcggggcaggcggatgcgcttgagggtggcgatcacggcggcgtggctgcggcgcacgtgcagcaacgccggcagttggaactccacggccagtttgagctgggcttcaaacaggctttgctggcgttcgcggtccagctgttcgagaaagtaatccaggccgatctcgcccactgcacacagttgcccgtggccgtgcaggcgcgtcaaccaatcgcccaacgccgtcaggtcagcggggcgatggtcgtcgaggtacaccgggtgcaggccaaaggcggcgaacaaaccttcgtccgcttgcaccaggtcccacagcctttgccaattctgctgatacacccccaacaccaccatgcgccgcacgcccagcgctcggctgtgggcgaggacttcccggcgatcgctgtcgaaatccgggaagtccaggtgcgtatgggtgtcgatcaactccacgctcaagcctcgtgaatacgctgcttgaacgtccggccgatggcatgcaccccaggttggtactgttcttcttcgatcgcggccagcgccaggcgcagggcggtatcggcgatcagttggtgctgctgggccatggcgttgaccggcagcggcaggaagtccagcaattgggtatcaccaaaggtgcccaggcgcagcgggcgcgtcttgagcgggaagtcatgcagcgcgtcgaacacgccttgcagcagcacgtaggacgtggtcaccagcgcgtcaggcaaatgccccagttgctgtagaagttgctccatcagctgtcggccgcagtcgcgactgaacgcttccgcgtgttcgacgatcacctcgccgctgaacccggcaagggcttcacggaaaccggcggcgcgttcctggctgatgctcaattcgggccgtgcgccgatcagcacaatctgcttgggcagcggttgcagcaggctgctggtcaactgctggcaggcctggcggtcatcgctgaccaccgaacagaactgatccgcacccatcacccggtcgatggcaatcaccggcaaccccttggcttgcagctcgcgataactgtcatcgctggcgggcaggcaactggcgacgaacagcgcatcacaacgccgcgcgcggaacagctgcagcaactggcgttcgctgtcggcgtcatcgtcggagctggcgatcagcaactgatagccgcgcgcccgtgcgccttgctccaggagcttggcgatacgtgcgtaactggggttttccagatcgggcaggatgaagcccaaggtgcgcgtgtgccgactgcgcagcccggcggcctgtgggttgggggtaaagccatgggcttcgacgacagcccgcacccgttcgacggtggcgttgctgatgcgctgctgttcggccttgccattgatgacgtagctggcggtggttacggacacaccggccaggcgggcgatatcactgagtttcaaaccgggatttccttgttttctggagcttgccccgacattttgtccaatcgtaaccgattccagcactcgaccaatgtctcagctcaagtgccgagtggttgttcaaggatgcgcaattaacgcgtaatctgccataaattctagattaaacgtttcagccagcgtatttttacgacgttcgcgactgagtagctactgccaactgactgctcagtcagctattgatgcacacccattacactgtttgtttaaaacaatacctagtgcggtcaccgcactaactaggagaacggcatgcttgagctcactgtagagcagatttccatgggccaggtggctgtggataaatctgctgccttgcacctgctcgctgacaaactggtggccgacggcctggtcgccgagggttatctcagtggcttgcaggcccgtgaagcccaaggctcgacctttctcggccaaggtattgccatccctcacggcaccccggaaacccgcgaccaggtgttctccaccggcgtgcgcctgctgcagttccctgaaggggtggactggggcgacggccagatcgtgtacctggccattggcattgccgccaaatccgacgaacacctgcgcctgttgcaactgctcacccgtgcccttggcgaaaccgacctgggccaggcattgcgccgtgccggaagcgccgaagtcctgctgaaactgctgcaaggcgcaccgcaggaactggcgctggatgcgcagatgatcagcctgggtgtgtccgccgacgacttcgaagagttggtctggcgcggcgcacgcctgttgcgccaggccgattgtgtgagcaatggtttcgccgccgtgttgcagcaggtcgacgcgttgcccctgggcgatggcctgtggtggttgcacagcgaacagaccgtcaagcgcccgggcctggcgttcgtcaccccggacaaacccatgcgttacctcggccagccgctccatggcctgttctgcctggccagtctcggcgaagcccaccaaacgctgttggagcgcctgtgcgccttgctcatcgaaggtcgcggccaggaactgggccgtgccaccagcagccgcgcggtgctcgaagtgcttggcggcgaactgcccccggactggcccagcgctcgcatcaccctggccaacgcccacggtttgcacgcgcgcccggcgaagatcctcgcgcagttggcgaaaagttttgatggcgacatccgcgtacgcatcgtcgatggcccggtcggcgccgtgtcggtgaaaagcctgagcaaactgctgagcctcggcgcacggcgtggccaggtgctggagttcgtcgccgagccgacgattgccggcgatgcgctgcccgcgttgctcgccgctgtgggggaaggcctcggtgaagaggtcgagccgctaccgacggtcagcgcccaacccgccgccctggatatcgagccggttgtcagtgcgccgaccagcggcagccagatccaggccattgccgctgcaccaggcatcgccatcggcccggcacatatccagatccagcaaacgttcgactatcctctgcgcggcgagtcctccgcgatcgagcgccaacgcctgcacagcgccctcggcgaagtgcgccgcgacatccagggcctgatcgagcgcagcccatccaaagcgatccgcgagattttcatcacccaccaggagatgctcgacgacccggaactcaccgacgaagtcgacactcgcctcaagcagggcgaaagcgccgaagcggcgtggatgagtgtgatcgaggcggccgccaggcagcaggagtcgttgcaggacgccttgctcgccgagcgcgccgccgacctgcgtgacatcggccgccgtgtattggcgcaactgtgcggcgtcgaaaccgtccaggagccgagccagccctacatcttggtaatggacgaggtcgggccgtcggacgtggcacgtcttgaccccgcgcgcgtcgctggcatcctcaccgcccgtggcggcgcgacggcccacagcgccatcgtcgcccgtgccctgggtatcccggcgctggtcggcgcgggcccggcggtattgctgctggcctccggcacccccctgttgctggatggccagcgcggtcgcctgcatgtcgaccccgacgccgccaccctgcaacgcgccacggtcgagcgcgacacccgcgaacaacgcctgcaagccgcttcggcgcaacgccacgaaccggcgctgacccgcgacggccatgccgtggaagtgttcgccaacatcggcgaaagcgccggtgtcgccggcgcggtggagcagggcgccgaaggcatcggcctgctgcgcaccgaactgattttcatggcccacccgcaagcgccggacgaagccacccaggaagccgaataccgccgcgtgctcgacggtcttggcggtcgcccgctggtagtgcgtactctcgatgtgggcggcgacaaaccgttgccgtattggccgattgccgaggaagaaaaccccttccttggcgtgcgcggcatccgtctcaccctgcaacgcccgcagatcatggaagcacaattgcgcgcgctgttacggtccgccgatagccgcccgctgcgcatcatgttccccatggtcggcagcgtcgacgaatggcgtgccgcccgtgatatgaccgagcgcctgcgcctggaaatcccggtggcggacctgcaactggggatcatgatcgaagtgccgtcggcggccttgctcgcaccggtactggccaaggaagtggactttttcagcgtcggcaccaacgacctgacccagtacaccctggccatcgaccgcggtcaccccaccttgtccgcccaggccgatggcctgcacccggcggtactgcaactgatcgacatcaccgtgcgcgccgcccatgcccatggcaaatgggtgggggtgtgcggcgaattggcagcagacccgctggcggtgccggtgctgatcggcctgggtgtggatgagttgagcgtgtcggcccgcagcattcccgaggtgaaggcgcgggtgcgtgaattcagtctgagcgaggcccagggcctggcgcaacaagcactggcggtgggctcgcccgccgaagtgcgtgccctagtggaggccgtgtagatggcaaggattctgaccctgacgctgaacccggcgttggacctgacggtgcgcctggcgcacctggaaccgggtgaagtgaaccgcagcgaaaccctgctgacccatgcagccggcaagggtgtgaatgtggcgcaggtgctggcggatttgggccatcaggtgagcgtgggcggtttcctcggcgaggcaaacccccaggccttcgagacactgatcgcccgccgtgggtttggtgacgcgttcattcgcgtgccgggcgaaacccgcagcaatatcaagattgccgaacaggacggccgggtcaccgatatcaatgcgccggggccgcaggtcagtgacgcggcacaagccgcgctgctcaagcgcatcgccgacatcggcgtgcaattcgatgcggtggtggtcgccggcagtttgccgcgtggcatcagcccgcagtggttccaggggctgttgcagcaactgaaaaacctcgggttgaaagtcgccctggacaccagcggcgaagcgctgcgcgccggtttgaaagcggggccgtggatggtcaagcccaacaccgaagagctggccgatgccctggggcatgccccggatgcaatcagccaactgcatcggcaaggcgtggaacatgtggtggtttccgatggcgctgccggcgtcacctggtatcgcccaggcgcggcgctgcaggccacgccgccaaaggtgatggtggccagtaccgtcggtgccggcgactcgctgctggccggcatgctgcacggtctgctcagtggcgatacgccggagcagaccctgcgccgcgctacggcgattgccgcgatggcagtgacgcagatcggttttggcatcagcgatgacgcgcagttggcgcgcctcgaaagcggcgtccacgtacgcacgctgacagaacaataagagggtttgtgatgaagttagccattgttactgcctgcccgaacggcatggtcaccagtgtgctgtgcgcccgcttgttggacgccgccgcgcagcgccagggctggagtaccagcgtcgaagtggtggatgtacagcgcccggagcgccaattgtcccaggcggtcatcgacgacgccgaatgggtgttgctggtcagcagcaccccggtggacatgcagcgctttgtcggcaagcgcgtgttcgagagcacaccggcccaggcgttggcggacgtcgacgccgtattgcgccgtggcaccgaagaggcgcaggtgtatgtcgcggctgaggcgccggccaggaacgcgccgcgcatcgtcgcgatcaccgcctgcccgaccggcgtcgcccataccttcatggccgccgaagcgttgcagcagacggccaagcgcctgggctatgacttgcaggtcgagacccagggttcggtcggcgcgcgcacgccattgagcgccgaagcgatcgccaatgccgacgtggtgttgctggccgccgatatcgaagtcgccaccgagcgcttcgccggcaagaagatctaccgatgtggcaccggcattgccctcaagcagtccgaagccaccctcaacaaggcccttgccgaaggtgcggtggaaagcgcggccagcggcgcggtgaccaagccggaaaaaaccggcgtgtacaaacacctgcttaccggtgtgtcgttcatgttgccgatggtggtggcaggcgggttgttgatcgccttgtcgttcgtgttcggtatccacgcctttgaacaggaaggcaccctggcggctgcgctgaaaaccgtcggcgaccgcgccttcatgctgatggtgccgctgctggcgggctacatcgcctactcgattgccgaccgtccgggcatcgcgccgggcatgattggcggcctgctggccggcaccctgggtgcaggttttatcggcggcatcttcgccggtttcctcgccggctactgcgtcaagttgatcacccgtgcggtgaagttgccgcagagcctggaggcgctcaagccgatcctgatcatcccgttgctggcgagcttgttcaccggcctggcgatgatctacctggtggggccgccggtcgcgcgcatgctggtggggctgactgattttctcagcaccatgggcacgaccaatgcggtactgctgggcatcctgctgggcggcatgatgtgtgtcgacctcggtggaccgatcaacaaggcggcctacgcattttctgtcggcctgctggcggcccacagcggcgcgccgatggccgcgaccatggcggccggcatggtgccgccgatcggcatgggtatcgcgaccttcctggcgcgccgcaagtttgcccagaccgagcgcgaagcgggcaaggcggcgatgatcctcggcttgtgcttcatctctgaaggcgcgatcccgtttgccgcgaaagacccgttgcgcgtgatcccgtccagtatcgccggcggtgcattgaccggtgccctgtccatgtacttcggctgcgtgctcgccgcgccccatggtggcctgtttgtgctggtgatcccgaatgcgatgaaccatgcgctgctgtacctgctggcaattgtcgccggcagcctgctgaccggcctggtctacgcgttgatcaaacgccccgaagcgcaagaactgactgtgacggtctgacgcggtgcagaaaatgtgggagggggcttgcccccgatagcggtgggtcagccataaatgtgctggctgacactctgccatcgggggcaagccccctcccaccgttgatcgctgtataggcgtcatctctgcttcatcggggcgtgctttagtggcccttttgatactcaagagggcacctgcatgagccacttcgatctcggccgccgccgcgtgatgcaagccgtcggcgccggcctgttgttgccgggcctggctccggcggtgatcgcttcggtcaaggaccggccgcagctcaccgatggcgtgcagtccggcgacctgctcggcgaccgcgccatgatctggagccgcagcgaccgcccggccaggatggtggtggagtgggacacccgcagtgtgttcagcaaccctcgtcggtttatatctccgctggccgaccagcgcagcgacttcaccgcccgcgtcgagctcaccgggctgcccgtcgaccaggcgatcttctaccgcgtgcacttcgaggatgcccagaccggcatcgccagcgagccgtggttcggccatctgcgtagcgtgccgcaacagcgccgcgacattcgttttgtgtggagcggcgacaccgtcggccaaggcttcggcatcaacccggacatcggcggcatgcgcatttacgaagccatgcgcctgcgcttgccggacttttttatccacagcggcgacaccatctacgccgacggccccgtgcccgcgcagctcaccgtcgaagacgggcgcatctggcgcaatatcaccactgaggccaagagcaaagtcgccgaaaccctcgacgaatatcgtggtaattaccgctacaacctgatggatgaaaacgtgcgccgcttcaacgccgaggtgccgcagatctggcagtgggacgatcatgaagtggtgaacaactggtcgccgagcaagcagttggatgagcgctatcgggtcaaggacatcaataccctggtcggccgtgcgcgccaggcctggctggaatactcaccgatgcgccggcaggcggcggacggcggcgggcggatctatcgcaagctcagctatggtccgctgctggatgtattcgtgctggacatgcgcagttatcgcgggcccaacgatgacaacctcggcggcgcaaaacccttcctcgggcgtgagcaattggactggctcaagcgtgaactcaagggctcccaggcgcagtggaaagtcatcgctgccgacatgcccatcggcctcggcgtacccgacggtgaagtcagccctggcgtaccgcgttgggaagccatcgccaacaacgagcctggtgcgccgcaaggccgcgaattggaaatcgccgagctgctgggctttttaagggcacaaaacgtgcgcaaccacgtgtggctgaccgctgatgtgcactactgcgcagcgcaccactaccacccggatcgggcggcgttccaggatttcgaaccgttctgggagtttgtcgccgggccgttgaacgcggggagtttcgggcctaatccgctggacaagacctttggccccgaagtggtgttcgagaaggcaccgccggcgcagaacacctcgccgctggcggggtttcagttttttggggaggtgaacattgatgggcagacggcggagttgactgtggtgctacgggacctggatggcgtctcggtgttcgaacaaaaactccagcccacctgaattggaacgctttgaaaactgtgggagggggcttgcccccgatgagggcgtatcagtctctgactgagctattgatacaccgctatcgggggcaagccccctcccacaggttgagtgttgttcgttcagggggtcagtacacatctcggcgatagcggccctgctcgatcaaccgctccacggcctcactgccgaggatgtccaccagcgtctgatccacccccgtggccatcccctgcaaactcccgcacacataaatcgccgcaccatcggccagccatttgcgcagcacatccgctgactcgcgcaggcggtcctgtacgtagatcttctcctcctgatcgcgggaaaacgccaggtcgagcaacgccagatcgccgctggccaaccagccttgcagttcgtcctggcagaggaagtcatgcttgatattgcgctcgccaaacagcaaccagttgcgctgctggccgtcggcgatacgtgccttgagcaaactgcgcaggcccgccaggccggtgccgttgcccagcaggatcagtggtaccggcgcctgcggcaggtggaacgcgctgttgcggcgcaggcgcaggctgatgttcgagccgagggcggcgtattcggtcagccagcctgagcccaggcccaggctgccatcggggtggcgttcctggcgcacgatcagttccagcacgccatcgctggcaatcgaggcgatggagtattcgcgcatgcccagcggcaccaacgcgtccaccagtgcctgggcgtgcaggccgaccaggtgtgcgcgatgggtcggcagttggcgagtggccagagcctggtcgagcgtatgcgccatgccgtcgatcaacacgccgtcgctgccggccaggcccaagccttcgaggaagtgttcgatggcccaggggcaattgcgcggcagcacttccaccaggtcgccggcttgccagctttgtggcgacggcgaggtgaggcccagcagatagacgtccgagccgctgctgtcgcggttgagcaatgagcgctggctgagcgtccagttttcatactgggcggtcggccacgcggatgcgggggcatggccggtcagttggccgagttgctgctgccagtgaagcagggcggtggtgtcgccgctgtcgacttccacgggcgcaaacagtgggttgccgccctggtttgtcagccagaaatgcaggcggcgggcaaagccgcagaaatgttcgtactggcgatcacccagggccagcaccgagtagttcaggcccttgagggacaggtcctggccgagcacgctgcgctcgaaaccacgggcactgtcgggggcttcgccgtcgccgaaggtgctgactacaaacagcgcgttttccgactggcgcaggtcgtcctggctgacgctgcccaggggctgcaccttcaccggcaggccggccgcctgtaattgccccgccgtttgccaggcaagctgttcggcaaagccgctctggctggcaaagccgatcagccacgcaggggcatcgctgtggttggcggtgaggccgttgcgcgcgtcacgcacctggcgttttttgcgccggcggtccaggtacagcagccagccggtgatgaagaacaatggcatcagcaccgagctgagtgtgaggacaatccgcccgatcaaaccgaagtagctgccggtgtgcagcgcatagacgctggtcagcagtctggaaccgaggcttttgctggcgtactgatcgtgggacttgatctcgccagtggccgggtcgaggttgatctggttcagtgcccggtcatggggcgagtttttcagcaggtaatagacggtagccggctgcccggcgaccgctggcatgcggatgttataggcgctcaaacctgggccggcgttgctgtagatgctgctccagatcgcgtcgtagttggccaccggtgccgcaccctcgggcgccgggccgcgcttgcgcacccgttcgttttgcggggcgtcggacagcagtctggtcaggccctggctgtaccagtcgtaggaccaatacaagccggtcagcgccgacagcaggtaggccagcaggcaccaggtgccgaacaccgagtgcaggtcccagttgaaggcccggccttttttgcgccagtccagcgtcagccaggcgcgccagctcgccacctggcgcggccagcgcaggtacaggccggacaggcagaagaacaccaggatcagtgtgcatgcgccggtgatgttgcgcccggtgtcacccatcaccaggaaacggtggaactgcagcaggaagccaaagaggtcctgaccgaccacatcacccatgtagtcgccggtgtagggatcgaaatagcgcaactggccacggcgctcgccgggtggcggcgtgaagaacacgcgggcggcgttgccgctctcactttccacgaacagcatggccacggtctggccttcggtggcctccagcttgcgcaccagctcggcgggcggcagtacgccggcttcgcgtttttccacggtcagtacgctggggttgagcgcccgcagtatttcatcctgaaacgagaccgcagccccgctgatccccatcaaggccagcaccagcccggctgtaatgccgaagaaccagtgcaactggaacagggttttcttcaacacgtctgaccgcctcgtctatccggatatgtagggcacggcgcgcattatgccgtggcttgtcgagaaacattctgttttacacgcaaaagccccacgcatccgatgcgtggggctctttgctgcgtggtgctgctgtttagaagtggaagctggtggtcaacaaggccgtacgaccggccgcctggttggcgaagtgggtggagaaggctttgtcgtaatacagcttgtccgtcaggttctgcacgttcaattgcaggtcgacgttcttggtcagcttgtaactggccatggcgtcgtagcgggtgtaagacggtacgtaaacggtgttgcccgcatcgccataaacctggtcgacgtagaacgcgccgccgccgatggtgagcttggaggtgacgtcgtaggtggtccacaggctgaaggtgttcttcggcgtgttgggcatttggttgcctttgttggagcccgcgctgaccacaccgttacgcccgttcaggccggatttgaccagttcgctgtcgaggtagctgtagccagcgaacacctgccattggtcggtgagcttgccgctggcggacaattccacgccgtcgacctgggactcacccgcattctgataggtcagggcgtcgactaggatgcgcgtatttttcttctcggtacggaacaccgcggcggtcagggacaggcggtcgtggaacaggtcccacttggtgcccagttcgtagttgacggtttcttccggctgcaagtcgctgctggcggcgccggcagacagagggttgccgtctgaaccttcaccgaccagccccccggcaggcgtcgccgatgtcgcgtaggaagcatagatgctggcgttttccaccggcttccagaccaggccggcttgccagttgaagaactggctgtcttccttgattttgctgcggccggtcgcggagtcggtgttggccacggtgtcgaaggtgtcgtagcgcaggccgacgttcagcaaccacttcgggtctagctcgatggtgtcgaacacataagcgccacggctggtggccttggtggcggtgccgtagtagttgcgggcgatgctgccggtccaggcatcatccgggttcggattgctcagggaggtgcactggccgcccaggctacccttggccacggtgcagactgggttggcgttggggctgatggtgtagctgctgacgcgggtttcttcaccggtgaactccaggccggtagagtagctgtgtttgaagcccagcgcctggaagctgccgaacaggtcggtctggttggtggtggtggtcgtggtcgacacccggctgttggcgcgacgccacacggtgccatagcggttgacgttgaatttgctgtcgtccggctgggtgagaatgtagtcctggccggtgctgccatggcgcagggtatttttcagcgtcatggtgtcgctcaggtcgtgctcgatggagaacgtgctgatatcggcgcgggtcttgcggaagtcgcgatccttgaggccgtagaagttgttgctgtcgccgccgtcggtgggtttgtcatgcacatgggcggtggcggtcgacgaaccatagccgtagggaatccccgaatccggcaggtcatcgctttccaggtggtagtagctgaggttgacacgggtcggggtgcccaggccaaaggtcagcgacggggccacgccccagcggtcgtaattgaccgcgtcgcggccggcgacgttctgttcatggctcatcaggttcaggcggaacgcggcgctgtcgtcgaggaactggcggttcacgtcgagcacgtagcggcgggtctggtccgaaccgtaggtgaagccgccgttggtgaagtcccgcgcttgtggggtcttgctcaccaggttgaggctgccaccggcagaaccacgaccgccgaacgaagagttcgggcctttgctgacttcgatcgattcgatgtcgaagatctcacggctctggccaccagtgtcgcgcacgccgtccaggtaggtgtcgccctgggcatcaaaaccacggatgaacgggcggtcgccctgggggttaccgccttcgcccgcaccaaaggtgatgcccggcacggtgcgcaaggcatcctgcaacgaggtggcggcggtgtccttgagtacttgttgcggcaccacggtgaccgagcgcggggtatccaccaacggtgcggtgtatttctgcgacgaggctttttcgacctggtaggaggtgttgtcctgcgcttccccggtgatgctggtggcgcccagggaaatgctgttgcgctggcctttttgttcagtctcttcggcggcctgtgccagatgggcgacagagctggcgctgagggcaacgccgatggctgaagccagcatgcgtggtgaaccggcaggtatttttgtagtggtgcgcgacatgacgtgtcctttccccaaggatgtgaggccgcggaatatagggcgaacaagactttctatcaattgcgatacattgctaattgcactgaatttacattctttacacttttggcttacggtttttacgaactcgttcgtctcagcgttttacagagtggataagaatcaataccattggcgcctccccgttttcaggtactgccccatgctgctgcacatccccggcctgttctctcgtgaggaagtgcagcgcattcgccaggccctggaaaacgccgattgggccgacggtaaaatcaccgccgggcaccagtccgccaaggccaagcacaacctgcaattgcccgagggccacccgctggccaaggaaattggcgcggcgatgcttgaacggctgtggcagaacccgttgtttatgtcagcggcgttaccgcataaggtgtttccaccgctgctcaattgctacacggcgggcggcagtttcgactttcatatcgacaacgccgtgcgccaatgcaagggcagccacgagcgtgtgcgcaccgacctgtcatccacgctgttcttcagcgaccccgacgaatacgacggcggcgaactggagatccaggacaccttcggcttgcagcgcgtaaagttgccggccggcgacatggtgctgtaccccggctccagcctgcacaaagtcaacgccgtgacccgtggcgcacgctatgcctcattcttctggacccagagcctggtgcgcgaagacagccagcgcaccctgctgtttgaaatggacggtgcgatccagcaactgacccgcgatgtgcctgaccatcctgcgctgatccaactcaccggcacgtatcacaacctgctgcgccgctgggtcgaggtctgacatgggctttttattacgccgggaagaagtgctcaacgccgagcaactgcaagcgatgctcgacgattcccccgtgcgcgcagcccaggcgatcctgatggcggcgaaggagggggtcgtcgatgcccaggcgttgctcgggcagatcttgctggaagggcgcggcattgcacgcgatgaggcattggccttgcgctggttccagatcgctgcacacagcgggcatttgatggcccgcaacatggctgggcgttgccgcgagcatggctggggatgtgatgtcgacgaggcggcagctgcacgggaataccgggtggctgccgaggcagggttggattgggggcagtacaactacgccaatctgctggctacggggcgcggtgtcgccgaggaccaaccacaagcattggcctgttatcgccgggcggccgagcaggggcatgccaagtcgatgaacctgctggggcgttacctggaagatggccggttctgcccacaggacctgcacgctgctgtggactggtatcgacgctcagccgaggccggagattttcgcgggcagttcagctatgcggcggtgctggccgacagaggtcagatcgacgcggcactgcagtggttgcgcaaggcgttggcgggcgggaacctgaagttcttgcgtgtggcgtacaaggccctggtagcggcgaatgacccgcagatccgggcgatggccgatgcctatcaacaacgtgccatcagcctttcttaaggcgtaaaaaaacccatgacatgtcatgggttttttatgtgcggcctttttacacgtagaacgatttcagtggcggaaagccattgaactccaccgcgctgtagctggtggtgtacgcaccggtcgacagccagtacaagcggtcaccaatcgccaggttcagcggcaggccgtacttgtagttttcgtacatgatgtcggcgctgtcgcaggtgggaccggcgatgaccacttcttccatctcgcctttcttctcggtccagatcgggaacttgatggcttcgtccatggtttcgatcaggccggagaacttgcccacgtccgtgtacacccaacgctcgacggcggtacgggatttacgtgcaaccaataccacttcactgaccaggataccggcgttggcgatcaacgaacggcccggctccaggatgatttccggcaggtcgtcgccgaagtcttccttgaggaagcggatgatttcttcggcgtaggtttccaggctgttggtgcgggtgatgtagttggccgggaagccgccgcccatgttgatcagcttcaggtgaataccgtcttcttctttcaggcgttcgaagatcactttgaccttggcgatcgccgcgtcccacacgctgatgtcgcgctgctgcgagcccacgtggaacgagatgccgtatggcaccaggcccaggtcacgggcgaggatcagcaggtccatggccatgtcggtctggcagccgaatttgcgcgacagcggccagtcagccgtggtcgagccttcggtgaggatacgtacatacactttagaacccggagcggccttggcgatgttgcgcaggtcggcttcggagtcggtggagaacaggcgtacgcctttctcgtagaagtagcggatgtccttggacttcttgatggtgttgccgtagctgatacggtcagggctgacgccacggcccagtaccttgtccagctcgtagatcgaggcgatgtcgaagctcgaacctttgtctttgagcaggtcgatgatctcgacggccgggttggccttgacggcgtaatagaccttggcgaattcgaaaccggcgcgcaggtcatcgtaggcctggctgatcatcgcggtgtcgatcaccacgaacggggtttcttgcttgtcggcgaacgccttcattttgtcaaaagtggcgcgcgcgaaataatcttcgacgttgatcgacatgctgggaactcctaagggcaaactgtagtaatcaatgggtgcaactgaacgtcctccgtatccccactttggttcgcctacttcccaaggcatgtcgccgaaagcaaaaaggccatgggatcaaccgcttcccttggccttgctgtctcgtcgtcagtacttgagccggatggatcgtttccagcatggacgttcggcgcgaactttaggacgtgaggggccatagatcaactaaaaatgtcgcgtttttgcacgcgctcgtcgcacagccgcgtgcagctacttatgtaaccgaccggtgtgacggaatgatgttccccggatagggcaaattggcgggattttgctgacacaacagagggcaaatgtgggagggggcttgcccccgatgtcggagtgtcagccatacataggctgactgacaccctgctatcgggggcaagccccctcccacatttttaaccgagcagcgtcacatcaagccaacgcggtttcagccggcgagacgatactggtcttgccgccacgggacttaccggagcttaagtactcggcaatcgactcctgggtcacttcacccaggaatacccgctccgcatccatcaccggcagccacgagcggttgaactcgtacatgcgcgacagcaggatgcgcaagtgctcgtcatatgcggccgtggcgttaaactcgcgcaggtactggccgcaggtaccggtctgacggtgcaggtcgcgacggcgtacataacccagcgccttgttctcggcacaggtgacgaccacatagcggcggtcggtttcgtccattagctccagggcatcggccaccggcgtttccgggctcaccgacggcgcgttgtccgccgcgtcttcggccttcaccagcagcagacgcttgagggtgctgtcctggcccacgaagttgctgacgaactcgtcggccgggtgtgccagcagcgtgtccgggtggtcgatctgcagcagcttgccggcgcggaagatggcgatcttgtcacccagcttgatggcctcgtcgatgtcgtggctgaccatgatcacggtcttgttcagcgcgcgctgcatctcgaagaactcgttctggatcatctcgcggttgatcgggtcgaccgcgccgaacggttcgtccatcagcagcagcggcgcatcggccgccagtgcacggatcacgccgatacgctgttgctggccacccgacagctcacgcggatagcgatgcaggtactgcttgggctccagcttgatcatgctcatcaactcgcgggcgcggtcgtggcatttctgcttgtcccagccgagcagcttgggcaccaccacgatgttttcctcgatggtcatgttggggaacagtccgatctgctggatcacatagccgatgttgcgacgcagtgtcacttcgtcgaggtcggtggtgtcttcgccgttgatcaggatcttgcccgaggtaggcttgatcaggcggttgatcattttcagcgtggtgcttttgccgcaacccgatgggccgaggaatacgcaaatctcaccttcgttgacggtcaggcttacatcgttcacggccgttacagtcttgccgttgctttggaaggtcttggacaggttttgaagttcgatcatttgagcaatccttttggagtcagcgagcgttgcagccattgcagaagcaggtcggcgaagatggccaggagactgaccagcacggcgccaacgatcagcatcgacatgtcgctgcggctgatggaagccagaataagtacacccaggccaccggcgccgatggtggcggcgatggtcatcacaccaatgttcatcaccacggctgtgcgcacaccggcgaggattaccggcacggcgatgggcaactcgaccatgcgcaggcgctggccgaaggtcatgccgatgcctttggcggcttcgcgaatgcccggctccacgccagtgagggcgaggtaggtgttacgcatgatcggcaacagggagtagaggaacacggcggtgatcgccggcatcggccccaggccctggccgaatttggagtagaacggcagcaacaggccgaacagcgcgatggacggcacggtcagcaacaccgtggcgctggcctgcaatgggccggcgagggtcgggaaacgcgtcatcagaatgcccaggggcacgccgatcaggatcgcgaggatcacggcgataccgaccagggtgatgtgctgcccggtcaggtgcaggacttgggcccaatcaagatgggaaaaggcgttcaggaattccatgtcttctcctcttattgattgatgggatgctggcgcaggaaatcggcggcaacagcggaagggctttcatggtcgacgtcgacccgcgcattcagctggcgcatggtttcgtcgtcgaacaggtcagccaacggtttgagttcagctgcgagcgttgggtgctggtcgaggtattcctggcggatcaccggtgcggcggtgtagtccgggaagtagtgcttgtcgtcttccagcagcttgagcttgaaggcgttcaggcggccgtcggtggtgtagaccaggccggcaaatacctggccgttacgcagcgcggtatagaccaggccggcgtccatctgtcgggtgtttttacgcgtgaggttcatgtcgtacagcttgaccatgccggccaggccgtcggagcggttggcgaactctgtatccagggcgaccaggcggttgctcttggcgtcttgcgccacggccttggtcaggtcgctgatcgtgctgatctcgggatgctcagcggcaactttctctggcagcgccagggcgtaggtgttgctgaagcgcgacggggagagccagaccaggccctttttcgcgtcgagttctttcacccgtgcgtaggactgttcgctgtcgagcttctcgtcgacatggttgtaggccaccagcgacacgccggtgtactcccagatcaggtccagttgcccgctttcctgggcgctgcgcgccaggttgctacccaatccgccggtcacgcgggtgtcatagcccttggtgcgcaggtactgggaagtgatttcggcgagcagggtctgttcggtgaacacccgggcgccgatgcggattaccggtttttcggcggcttgcgcaatgcctgcaaagagcaggacgcagctcactatcaatgtcagttttttcatgtcggttccttaagacgcacgcaacccgcgttccagccagaggcggctggccagggtcaccagaccgtcaagcagcaaagccagcagcgcggtgcacgcggcgccgagcagcaattgcggctgattgttcagggcgatgccggggaagatcaggctgcccaggctgttggcaccgatcaggaacgccagcggcgcggtgccgacattgatcgccagggccacacgcacaccgccaatgatgattggcacggcgttgggcaattccacgcgaaacagcacttggcgcggcgtcatgccgatgccggtggcggcttctttcagggagccctggacgtttttcaggccttcgtaggtgttgcgcacgataggcaggagggaggcgaggaacagcgcgaagatggccgggccgctgccgatgccaagaacgccgagggcgatggccagtacggccaggggcgggacggtgttgccgatgttgaagatctgcatgaagcgttctgcgcgcccgaccatgtgcggtcggctgagcaggataccggcggggatgcccacaacgagggcggccagcatggagacaagaacgaggatcaggtgtgcttgcaggtaaaacaacaaatcgtcgcggtacagttcgatcgtgttgatgccgatccagtggaccagcagggccaggagcgcgacgacaaccgcacctcctatcagccctttgccatagcgaatagccacaggcggactccttttttcttctgtcggcgcccacattctccggcggcaatgccattcctggctgcctctgaatgtggtcgcgaaatgcagctcgtcgataccggcaacgcggtaaaaatccgagccatgagcgcagcctcgtcaggctaacttgctgatttatcagcccctgttccgagtgcgatagcaggggagtggacgtctcgaccttttaaaaggttccatacttggcagcatttagccacccctaatcgggtgaacggtggtccggcacctggggtttgcgctatactcgccgcccttttttgactcacctgccaggcgatttcccatgacccaccaggccgccgaagtcgcgaaacgccgcactttcgccattatttcccaccccgatgccggtaaaaccaccatcacagagaagctcttgctgatgggcaaggcaatcgcagtggccggcacggtgaaatcccgcaaatccgaccgccatgccacctccgactggatggaaatggaaaaacaacggggtatctcgattaccacgtcggtcatgcagttcccgtatcgcgaccacatggtcaacctgctcgacaccccgggccacgaagacttctctgaagacacctaccgcaccctgaccgcggtggactcggcgttgatggtcctcgacggcggtaaaggtgtcgagccacgtaccatcgcgctgatggacgtgtgccgtctgcgtgacacgcccatcgtcagcttcatcaacaaactcgatcgcgatatccgcgaccccatcgagctgctggatgaaatcgaagccgtcctgaagatcaaggccgcgccgatcacctggccgatcggttgctaccgcgacttcaagggcgtgtaccacctggccgacgactacatcattgtctacaccgccggccacggtcacgagcgcaccgaaaccaagatcatcgagaagctcgactccgacgaagcccgcgcccacctgggtgatgagtacgaccgttttgtcgaccagctggaactggtgcagggcgcctgccacgagttcaaccagcaggaattcctcgacggccaactgactccggtgttcttcgggaccgccctgggcaacttcggtgtcgaccacgtactcgacgcggtcgtcgactgggcgccgcgcccactggcacgggtggccaacgagcgcaccgtggaaccggtggaagagaagttctcgggcttcgtgttcaagatccaggcgaacatggaccccaagcaccgcgaccgtatcgccttcatgcgcatctgctccggcaaatacgaaaaaggcatgaagatgcgccacgtgcgcaccggcaaggacgtgcgcatcggcgacgccctgacgttcttctcctccgagcgtgaacagctggaagaggcgtttgccggcgacatcatcggcctgcacaaccatggcaccatccagatcggcgacaccttcaccgaaggcgaaaccctgggcttcaccggcatcccgcacttcgccccggaactgttccgccgtgtacgcctgcgcgacccgctcaaatccaagcaactgcgccagggcctgcaacaactcgcggaagagggcgccacccaggtgttcttccccgagcgcagcaacgacatcatcctcggcgccgtcggtgtgctgcagttcgatgtggtcgccagccgcctgaaagaggaatacaaggtggagtgctcgtatgagccaatcaccgtgtactccgcgcgctggatcgattgcagcgataagaagaagttggaagagttttccaacaaggccgtggaaaacctcgcggtggacggtggcggtcacctgacctacctcgcgcctacccgagtgaacctggcgttgatggaagagcgctggccggacgtgaaattccgcgcgacccgcgaacaccattaaggtctgagcggtaaatagaagggtgaagctgtgatggcttcaccctttttattggccaaacacaaattaaaatgtgggagggggcaagtcgaatcgtcgcaccgcccctcccacattttgatcttcatcgatcagggccattggcgagaaacccacatcccgtctagcgtttcaggtatttcacttacccatcgacggaataggaggccaccgtgcgtataactcaacgcgccattcaactggtgctgctgggggctctggggttgtccgcctcattggcgcttgcaggcgccggagcgccccaatggaagggcacgggccctgtcaccaagaagaagcagcaggaggtcaactccggaagttggcaaccccaggcgcagcctgcgcccaaggaggatgcggaaaacccctataacgaaggggaagacagcgaaacctatgatgacggtgacacctgatagctggcgcaaaccctctatcacaactagcttcaaggactggcgacggtaaatcgctgtcgtacggattcatctactgactggacggaaatcgaccatgactatctttcaacgtgtagtgctgttgctgaaagtgttggtgatgctatccctgggcatctcgtccgcatgggccaatgcggctgtgcagagccaggcgccgggctttgtggcggcgaagacggtgcaggccggtggtttgcaactggccaagagcgagtcggaacccggtgacgaagatcagggcggctcaaaggatgatgacgaccagcaagcgccgccagatgacgatgacactgaaggtgacagcgacacctgatacgtctgggcccccctgcctgtaatgcccgcgatcgttcccgcgctctgcgtgggaacgcattctttgacgctccccattacctttgattgctgagccgatctgtcaggtttgacagtagacggccggcgctcgcctccttatttttcaggtgtctttatccaggggcctttcaatgcctgaaacaggagagcaccatgaaaaacaaagcgacgggacggtttaaatggaaagtgggagctcaggcccttgaatcgaccgatctggattttgtggctgatgaccaaagcgaggatttcgtggttcaagcccgttccactgcaagcgacggtgtagatgtagagctgacgctttatattccagaacgagacccgcaaagtaaaaaatacacctacggttcccatgacgagtatcaagcctcggttcattacactgtcggcggtcgacctaatagttgggagggcggctacgtggttcgggaagcggcggacttttcttccatcgatccgggcatttggcgcgtcaagctcatttttgggattgaggttgccctgaacggcggtgttatttcgataaagggcgagggcgaagtcaaaggggctgctccctggggtaaaaccctgcgcaagcgttttccatccaagcccaaaagaaagcccctcccaccaggctgatgcgcaacctgatgggaggggctgtagaacacatgcaatgccctgggcttagtcacccagggcatttttgttgcggtgtcacgccacaaattgctccgcgtaatggcaagccacctggcggttatccagcggccgcaactgcggctcctcggtgctgcaccgcgccgtcgcgtacgggcaacgcttgtggaacgcgcagcccggcggcgggttcagcgggttgggcagttcgccgacaatcttgatcttcggcttgttcgggtccgggtggatggtcggcgtggccgacagcagcgcctgggtgtacggatgcagcgggcgtgcgtagatgtcttccttggggcccacttccaccgggcggccgaggtacatcaccatcacgtcatcggcgacatgctgcaccaccgccaggttgtgggagatgaacacgtaggccgtgttgaattcctgctgcaggtccatgaacaggttgagcacctgggcctggatcgacacgtcgagtgccgaggtcggttcatccgccaccagcactttcggttgcagcatcatcgcgcgggccagggcgatgcgctggcgctgaccaccagagaacatgtgcgggtagcgctgataatgctcggggcgcaggcccacttgcttcatcatcgcctgcactttttcgcggcgttcggcggcggacaggttggtgttgatcaatagcggctcgccgagttgatcaccgaccttctggcgtgggttcaacgacgcgtacgggctctggaacaccatctgcacgtctttgcgcaattgcttgcgttgggccttgtcggcaccggcgacttcctggccggcgattttcagggagcccgaagacggctcttcaatcagcgtgagcgcacgggccagggtggatttgccgcaacccgactcgcccacaaccgcgagggtcttgccggcttccaattcaaaggacacgccattgagtgcgcgcaccagcgcgtggcccttgaacaggccgcgggacacttcgtagtgacgggtcaggtcgcgggcggtaagaacgacggccattacgccacctcctggttcaaggggtagaagcagcgcgcaaggctgttggttttcggatcaaggccgggacgctgggcgcggcagctgtcctgcacatacgggcagcgcggtgacagcaggcaaccctgcgggcggtcataacgacctggaacgatacccggcagcgtggccaggcgagtggcgccgaggctgtgctcggggatcgccttgagcagcgcttcgctgtacgggtgcgccggaatgtcgaacaactgcggcacctggccgacttccacggcttggccggcgtacatcacgcacacgcgctgggcggtttccgccacgacagcaaggtcgtgagtgatcagcaccaggcccatgttctgctctttctgcagggccagcagcagttccatgatctgcgcctggatggtcacgtccaacgccgtggtcggttcgtccgcgatcagcagtttcggctcgccggcaatcgccatggcgatggccacacgctggctcataccgccggacagttggtgcgggtaggcatccatacggctggcagcgcccgggatttcaaccttttccaacagttcgatggcacgcttgcgcgcttgcttgccggacattttcaggtgcaggcgcagcacttcttcgatctggaagcccacggtgtagctggggttcagcgcggtcatcgggtcctggaacaccatcgccaggtctttgccgacgatctggcggcgctggcggttgctcaacttgagcatgtccttgccgtcgaagttcagggcgtcggcggtgacgatgccggggtgctcgatgaggcccatcagcgccatcatggtcacggatttacccgagcccgactcgccaacgatggccagtacttcgcctttgtcgacggaaatgtcgaggccatcgaccaccggcacggcggtcttgtcgccgaagcgcacgttgagattcttgatttctaacagtgacatgggaatctcctcaggcggcgttcttgagtttcgggtccagcgcatcgcgcaggccgtcgcccatcaagttgattgccagcacgctgagcaaaatggtcaaacccggcaggctcaccacccaccaggcgcgttcgatgtagtcacgggccgaagccagcatggtgccccactctggggttggcggttgtacgccaaggccgaggaagccgagggccgcagcatcgaggatcgccgaagagaagctcaaggtggcctggacgatcagcggtgccatgcagttgggcagcacggtgatgaacatcaggcgcggcaagccggcgccggcgaggcgggcggcagtcacgtagtcgcggttcagttcgcccatcaccgcagcgcgggtcagacgcacgtaggacggcagcgacacgatcgcgatggcgatcacggtgttgatcaggccagggccgaggattgccacaatggcgacggccagcagcagcgacggcagggccagcatgatgtccatcagacgcatgatggtcgggccgagcaagcgcgggaagaacccggcgaacagacccagcaggatgcccgggatcagcgacatcaccaccgacgacaaaccgatcagcaacgacaggcgcgagccctggatcaggcgtgaaagcaggtcacggcccagttcgtcggtgccgagcaggaattgcatctgcccaccctccagccaggctggcggggtcagcaggaagtcgcggtattgctcgctggggttatgcggtgccacccacggagcgaagatcgcgcagaacacgatcagcaacatgaacagcaggccggcaactgcgcctttgttcttggagaaggcttgccagaattctttgtacggggacgggtacagcaggctttgatcgactgctgacactggagtaggtgtggtcatggtcatgatctcagcgctggtgacggatgcgtgggttggcgaagccgtagaggatatccaccacgaagttcaccaggatcaccaggcaggcgatcagcaggatgccgttctgcaccaccgggtagtcccgcgcgccaatggcttcgatcagccatttgccgatgccgggccacgagaagatggtttcggtcaggaccgcaccggccagcagggtgccgacttgcaggccgaccacggtcagtaccggaatcagcgcgttacgcaggccgtgcacgaacaccacgcgtgccggcgacaggcctttggccttggcggtacggatgtagtcttcgcgcagcacttcgagcatcgacgaacgggtcatccgcgcgatcaccgccagcgggatggtgccgagcacgatggccggcaggatcaggtggtgcagggcgtcgaagaacgcgtccggctcgtcagccagcagcgtgtcgatgagcatgaagccggtacgcggctcgatgtcgtaaagcaggtcgatacgcccggaaaccggggtccagcccaggctgaccgagaagaacatgatcaggatcaggccccaccagaagatcggcatcgagtatcccgccagggagatgcccatcaccccgtggtcgaacagggatcctcgcttcaatgccgcgatcaccccggccaacaggcccaggataccggcgaacaacagggcggccatggacagttccagggtcgcggggaagagggcggtgaattcagtccacacgctggtgcgggtccgcagcgattcgccaaggtcaccctgggcgagcttgccgacgtaatccaggtattgcgcatacagcggcttgttaaggccaaggcgttccattgcctgtgcgtgcatctcggggtcgacgcgccgctcgcccatcatgacttcgacggggtcgccagggatcatgcgtatcaacgcaaacgtgagcaacgtgatgccgaaaaacgtggggatcaataaccccagtcggcgggcaataaaactaaacatcttgtcgtgtacctcaatcagccggttaggcaggtccggcgccgtcaatgtcgacggcgccgagcgtttttcttatttacttcacctgggtggtggcgaagttattgttcgtcagagggctttgggtataaccctcgacgttcttgcgcatagcggtgaacattttcgggtaagccatggggatccatggttggtccttgtcgaaaacgtccatggcttgttcatagagtgcagcgcgttgtgcgggttcagccacagcgcgcgccttgtcgatcaagtcttgaaactctttgttacaccagcgcgcgtagttttcgccgtttttcgctgcatcgcaactcaggttcggcgtgaggaagttatccgggtcgccgttatcccccgcccatccggcggataccatgtcgtgttcaccgtttttagcacgcttgagcatttcgccccattccatgactttgatattcaccttcaagccaatctgcgccagatccgcctgcatgcgctgggcgccgagcatcgggttagggttggtcgggccgccgccgttacgggtgaacagggtgaactcggtgccttccggcacacccgcttccttgagcagggcacgggccttgtcgaggtcgcgcggtgggtttttcagcttgtcgttgaagcccagcagcgtggggggaaacgggccggtggcatcgacagcgttgcctttgccgtacagcgattcgttgtagccttttttgtcgaacgcgatgttgatcgcgtgacgcacccgtgcgtcgctcatgtacttgtgggtggtgttcagtgcggtgtaggcggtggtcatcgccgccagttcatcgaccttcaggttcgggtctttcttgatgctgggcaggtcatcgggcttgggatatagcgcgacctggcattcgttggccttgagcttctgcaggcgcacgttgttatcgaccgcaatggccaggatcaacggatcggccggcggcttgccacggaagtactccgggttggccttgaagcgcacctgggcatctttctggtagcggatgaagatgaacgggccggtaccgatcggcttgctattgagctcatcggtcttaccggcggcgagcagtttgtcggcgtattcagcggagtggatggcggtaaacggcatcgcgacatcggccaggaacggtgcttcagggcgcgtcagggtgaagaccaccgtgtggtcatcagtcttctcgacacttttgagcagttccttgaagcccatgctttcgaaataggggaaacccgtggtggatttgttatgccaagggtgtttcgggtccaactggcgctggaagctccagagcacgtcatcggcattcaagttacgcgtgggtttgaaatagtcggtggtgtggaacttgacgtcatcgcgcaggtggaacgtataggtcaggccgtcgtcactgatttcccagctcttggcgagcgcgggaacgatttcagtggtgcctggcttgaagtccaccaaacggttgaacatggtttcagcagcggcgtcagcagtcacggccgtggtgtacaggaccgggtcgaaaccttccgggctggcttcggtgcagaccaccagtggtttggccgaaacgccgatggccacgctcaacaatgcggcagccatggcggcttgtagtgggagcaatttcattcggagccctctgcaatcgatgggaccagacaagcgtagacggcgggctcgtcctgagcccgccgtctacctggtgctaattaaagaatgttgaacgggatggtggtgaccaggcggaattcgcgcaggttgccgtcagactggttttcgctggcgcggtgcgtcacgtaggtggcacgaacggtagtggctttcagaggaccgctctggatcgcataggaagaaccaatgccgtattcctggtggtgctcgccgttctgggcctgaatgccgttgtaggcgaagtctttcacaccgttgtcaccacggtagtgagtgccgtcgataccccagccgcgagccgagtagatgttgaacttcaggcctggcacgccatattcggccatgttgatgccgtaggcgacctggaaggacttctcgttcggaccgttgaagtcggaagtcagggagttggccaggtagatgccgttggtttcgtgcaggtagtcgaagtactcgttaccgttcacttcctggtacgagaaggtcaggctgtgagcctggtgagtcaggcccagcgacagcgagtaggtatcgttgtcgatcgtgcccatcaactttttgccttcgtcgacggttttgtagtagttcaggccggtggtcaggctcagtgcctggctgtcacccagctcatgggtagcgccgaagtagtactggttccagaagtctttcacgttggcggcgaacaggctggtcttcaggctcttgaatggctggtagttgacgccgagggtactgaccttatcggtctcctgcttgccattaccatactcactacggaatttcgacaggctctgctcagtccgcggggatacgcggtcaaagacgccgccctggaacgacaggttgctgaactcttcgctgttgaagctcacaccttcaaagctcgaaggcaatgcgcggttgccgatggtgtcgacgatgccactactgaagttctggcgaccggcggtcaacgtggtgttcgacacacggaacttgacgttggccagacccagtttgctccactggcctactgcgtcaccgaaggagtgagccagggtacggttggagccgccagcgatgtctttttggtcccggtcaagcgctatgtagttgtaagcggcgacttcggtactcacgccaactgtgccttgggtgaagcccgaggtgtagttgaggatcgtgccttgagcccagttgtaacgacgggaggtcgtggtcttgaccgtatcgccttcgtttttgaagtagctgaaacggtcgccacggaacttcatttcgttggagtaccagttacgggttgtaccgcccaggctttgaccgtcgataaagcccttggcctcgctttgcgcgctggtgccggccagtgtggtcggaacgaagtcctggctttgggtttcagcgtaggcggtggccgtgatgctgctgatggccagggccagaagcgctttgctgctcagtttcatggatgaagctcctttggttctctttttaatgccggtcttttttggtgatccggctattgggtgtgtaactcgttcaagccattgcaaacgtttggcgtaggaaaaatcccaacaaaaggccgcgcgtttgcagcaaggcgggggccgccctgcgcaatccggttattttcttatggggtgatactgacgcccgagaacacgttgcgaccgaaggggcttaccttgaacccttcgactttggcgcttaacggctggttgaccgtcgagtgggcgactggcgtgatcggcacctgctgcttgagcagttgctgcgcctgtttgtacagaatagtccgttgttcgcggtcggtgacgaccttggcttgcttgatcagcttgtcgtacgccgggtcacaccacatggagtagttgttcccgccgatggcatcgcagctgtaaagggtgcccagccagttgtccgggtcgccgttgtcgccggtccaaccgatcaggctcacatcgtgctcaccgttcttggtgcgcttgatgtattcgccccactcgtagctgacgatcttgaccttgaggccgatcttggcccagtcgctttgcagcatctcggccatcagcttggcgttggggttgtacggccgttgcaccggcatcgcccacagggtgatttcggtgccttccttcacgccggcggccttgagcagttccttggctttttccgggttgtaggcggcgtccttgatggtctcgtcgtaggaccattgcgtcggcggcatggcgttgaccgccagttgccccgcgccctggtacacggcgttcaggatgctcggtttgttcaccgccatgtccagcgcctggcgcacttcgagctggtcgaacggcttgtggcgcacgttgtaggcgatgtagcccagattgaaccccggcttggtcagcaattgcaggttcgggtcggccttgagggcgtcgacgtcagccggacgcggatgcagggtcacctggcattcgccggccttgagcttttgcacgcgcaccgaggcgtcggtgttgatggcgaaaatcagctggtcgagcttgaccttgctcgggtcccagtactgtttgttggccacatagcggatctgcgaatctttctggtaacgctggaacacgaaggggccagtgccaatcggcttctggttgatgtcgctgggcttgccggccttgagcagttgctcggcatattcggccgacaggatcgcggcgaagctcatggcgatgttctggatgaacgcggcgtcgaccgtgttcagggtgatcaccacggtgtgcgggtcggttttggcgaccttggcaatgttcttgttcaggctcatcccgttgaagtacggaaactcggtggggtaggccttgcgaaacggatggtcggggtcaagcatgcggttgaaggtgaacagcacgtcgtcggcgttgaagtcccgggtcggcttgaattccttgttgctgtggaatttcaccccttcacgcagatgaaaggtataggtcaggccgtctggcgaaatatcccacttggttgccaatgccggtacgacactcgtctcgcccttttcaaactcaaccagtcggttgtacagcggctcggccacatcgttatcggtggcggtggtgtactgcgcggtgtcgaagccggccgggctgccttccgagcagaacaccaggctctgcttgtcggcggcgtgacccatcgtggcggcagccagcaggctggtgccaaaaagtgcggatagaacggtggtatggcgcatgacgatcccgatccttgtttgtagttgtcatcagtgagcaatcaccccggcgttcagccagggagacatcactgatcccacgcgcagcaagtgcctttccgaattgggagcctctgctgtcctacgacgttatgggtcgcggacttcgcagtaaatgcgccaaatcggactgaccttgtaggcaatggagtcgcactgcgcagttcattgctgtaggaagcaacggtttcgagtgtggtccatgtcctacggccaaggcggatgcaataacggcgacgtttatgcaacgtcgccgccagtgatccttacttgccgcttacgctcacgccgtagaaggagttcaagccaaacgggctgatcttgaagtcctgcacggtgttgcgcatgggttgatacaccgtcgagtgcgcgataggtgtcatcgggactgcatctttgaggatatgttgcgcctgcttgtacagctcggtgcgtttggcgacgtccgacgttgccttggcttctttgacgatgccgtcgaatttcttgtcgcaccacttggagaagttgttgccggccagcgagtcgcagccgaacagcacgttcagccagttgtccgggtcaccattgtcgccgctccagccaatgatcatggcctggttctcgccgcctttggaacgcttgatgtactcgccccattcgtagctgacgatgttgaccttcaggccgatctgtttccagtcgttctgcagcatctcggccatcagtttggcgttcgggttgtacggacgttgaaccggcatggcccacagggtgatctcggtgccgtctttgacgccggcctgcttgagcaggtccttggccttggccacgtcgtacggtgcatccttgatggtggtgtcgtaggaccattgggttggtggcatggcgttgacggccagttggccggcgccctgatacacggagtcgatgatctgctgcttgttcaccgacatgtccagcgcttcacgtacgcgcaggtcggacagtgggttggcggcggtctggcccttgaggaccggcatcacgttgtaagcgatatagcccaggttgaaaccggcttgatgcggcagtttcaggtccttgtcatcgcccagcgccttgaggtcggccggacgtgggaacaaggtgatctggcattcatttttcttcagcttctggatacgcaccgacgggtcggtggtgatggcgaagatcaggttgtcgatcttcacgtcttcaggtttccagtagtccttgttgccggtgtaacggatgttcgagtctttctggtagctcttgaacacgaacgggccagtgccgattggcttctggttgatgtccgcggccttgccgtctttcaacagttgggcggcgtattcagccgactggatcgaagcgaagctcatcgccaggttctggatgaaggcggcgtccacggtgccaagggtgaacttgacagtatggtcatcgactttttcgatgttcttgatgttggtgtccatccccatgtccgtgaagtacgggaactcggtggggtaggccttacggaacggatcgtccttgttgatcatgcggttgaacgtgaacagcacgtcatcggcattgaaggtacgggtcggcttgaagtacgaggtggtatggaacttgacgccatcacgcaggtggaaggtgtaggtcaagccatccggggacacgtcccagctggtggccagcccaggaatcacagcggtgccgccgcgttcgaactgggtcaggcggttgaacatggtttcggccgaggcatcgaagtctgttccggtggtgtactggcctgggtcgaaaccggccgggctcccttcggagcagaacaccaggttagtcgccgcttgggcgaaaggagctgcggccataaggccagcgctaacaattaacggaatgactgcgtgtttaagcatgttggcctcatgatttgttgtcatttttggtggtgagggcgacctcgtgagtcggcctgcggatacttatgcaggcgccatacccattgcaagatgctgaaccgttgcgagggtgaaacagtggtacgaacgtacaggaatgtcgcaattatgaaagtttcgacatatttgcgcatatttcgagggttttttcggtgcattcatcgcaccaaaaaagcccaaccgaggcgtctggcgcactcggttggggcgttgctgttacttatctagactcacgccgtagaacggtgtcaggccaaacgggctgatcttgaagtccctcacttccttacgcaggggctggaaaaccgtcgagtttgcaataggcgttataggtacttgttccttaaggattttttgtgcctgttgataccactttatgcgctgttcgcggtcgttgctgaccttggcctgttgcaccagtttgtcgtaggtcgggttacaccatttggcgtagttgctgcccttcaccgcagcacaactgtagagcacgccgagccagttatccgggtcgccgttgtcgccggtccagccataaatcatcgcgtcatgctcgccgtttttggcgcgcttgatgtactcgccccattcgtagctgacgatattggccttgatcccgatcttttcccaatcctgctggatcatttgcgccgacatgcgcgcgttcgggttggaggcgcgttgcacggtcattgcccacaggttgatggtggtacctggtgcaacccctgcttcttttagtagcgccttggctttggtcggatcgtagggcgcgtccttgatggtggggtcataagaccactgcgctggaggcagcgcgttctgcgccaattgtccggcactctggtacaccgccttgataatcgccggcttgtcgatcgccatgtccagggcctggcgcaccttgagctgatccagcggcgggtgggtcacgttgtaggccaggaagcccaggttgaaaccagcctgctgcagcacgcgcaagttcgggtcctgtttcatcacttcgatatcggcagggcgcgggtagccgctgacctggcattcgccggccttgagcttctgcaagcgcgacgcggcatccggggtgatggcgaacaccaggttgtcgagcttcacatcctcgggcttccagtactgtttattggccacgtagcggatctgcgaatccttctggtagcgcttgaacacaaacggcccggtgcctacgggtttctggttgatctcttcggccttgccctgcttgagcagttgcgcggcgtactcggcggattgcaccgaggcaaagctcatggccaggttttgcacaaacgacgcatcgacgttgttcaggttgaagcgcacggtgtggtcgtcaagtttctcgacgctcttgatcgtggtgttcaagcccatgtcggtgaagtacggcgactcggaggggtaggccttgcggaacggactgtcggcatccagcaggcgattgaaggtgaacagcacgtcatccgcgttgaaatcgcgggtaggggtgaagaaatcggtggtgtggaacttgacgccatcgcgcagatggaaggtgtaggtcaggccgtctttggagatgtcccagcttgtcgccaggccaggttcgacttcggtgccgccacgcttgaactgcgtgaggcggttgaacacggtttcggccgaagcatcgaaatcggtgccgctggtgtactggctggggtcgaagccggcagggctggcttcggaacagtagaccagggtgctggctgcctgggccattggcatgaagccgagcaggcctgcggcgaggaggagcggttttaaggcaattctttccatggagacccctgaagtggcagttgatcactgtccgaacgaaaaacggcggttaccgaggttaccgccgttaagcatcttcaggtaggtggaaggctggtggtgctggtcacggcctcattgttgatcgatggttacggcgttttgaccgatacttccacgtgggttggcgcatttttgtcgatagtaaagcggctgcccgctgagctggagtggtgaatggtaaaggtgcgtctgattttgacgttgatgttgtccaggtatccctcttctacgtgtttgaggcgatagtcgccggtggccgatacacgggtaatgtttttcgacgggtcgtagtcgatgtgataggtcgagtcattattggagatcgatacgccctcggccaatacgccttccttcaattcgccagagggtgttcggtgcaggagaaaagattccatggcaggtcccattgaaccttggtgagccacttcggaaatacgggcgcgcagttctggatcgggaatgatttgttcaaactgtttgattttttcagcctgtattgcctgaccattgctccctgtactgcgtaaggtatgttcagtgattccgtcgggcgtggttgttctcaggttgtagtttccgcgattgatatcgagcacaaagtttttggagtagtcgttgtcaccttcccaatgcgtggctttttcttctggcagaagctcaaagtttggttcttccagcgtccaggaaacgttgagtttgtgcttgattgcaccgctttcttcgaagttgctcgtggacaagacatagtccgtgtttttgccgaaatcaaagtagttatcaaacgattcggtcccctgcatttttgagccgtcaagtgtcacgaactgatcggagaacttaggcggtatgcttgattcgtcactgggggctggcgatggcgtacgttgccatggccacttgcgtgcgcctcctgggccgatttcacgggcccattcgccgtccagcgtggaatgagcggtcatcaccggcttgcgtgttgcacgatcaatgatctgtacataatcgttgctcagtttgaaatcgcttttgatctcgtacacctgaggcgtgccggtagcatcggtatagcggataaaccattggtccgtgccatcgggggttttgatttgatagatcccttttgaattgcgggtcgcgccttcgatcagttgctcgccgtttggcactgcgtgctgactgatattggctgcctgagtcggcttgagtcgattgacggagggctcttcgacgatgggcgttgtcggtgtgtcggtgtctggcaccactggctctttgacggtgtcctctatgctctcgctgaccgtggtgacggccccttgctcgccttttattaatttgctcgcctcaccagcgacaacgggcaccgcattcaatacgccaaacacaatatggtccgcgccacctggcttgccatgcttgagttggtccgcgcctatcccggcttccaacgcaccggcagcggcataaaatacctccagtcccactgcgacctcgggcatgacgatagccagcggggtcatcatcaaggcgatctttgtggtggtttccaacacttcaaggatcgtggctttggtgacatctccatcggtggttatttcggtttcggcatcggcgtatgagcgctctttctgccgccgggtcatggttgtgaatgggtcatcggacagcggttcggtagtaatgaaccgttgtgggtcaaattcattgagacgttccagagggccggcatcgggtgcgtcttttttcgaccagccgccgagcccggccagcgtttgattgaccccgtcagagaaaaagcgattggcctggtcacgtaacggaaagtgcatcgacagggcttcacgcttgaccggatcagccgcctgttcagccagccagttcttcatctcggcctggctgttgaacgaatgaatcggcgaggagttgccggggatatacagcaacgtacggttgaaaggtttaccttcggcatcgacgcgtgttgtcttgtcggtgatgtaaagcaggtctgtcgacttgtagccattgatgctcagcaggccaacttccatgttgggatccttgatgatagcgggcgaaagatcatcaagtttgagcttctcccaggtcgtgctcagcggcaggccggcggcgcgcatggccaagtccgtatcactatcgctcaagctgtcgttttcaaattgacgcaaagcacctcccacgaaggatgctttactcatttgttcgtacttgcgctcatgcgcgggccagaactcattcaggaattgcgtatacggtttgctgaagtcggtgttccatacgatgctacgaaataccgcaggtgtttggggtagcaggtttgtacggtcgtatacctctggttggccgggctgcgcccccacgtatatgccttcgtaggtcttctgcgggtgtgcgatcgaaacaaccttatcaaccaccgcgggcaaagggagcgcgggcgcgaggcggtctagccaggtgtgcagggttgatcgcagcttttcgggcgacgtctggtgctcgtcttccttattagcgctctggatgttatgcagcgcggcctgcgtcagtgatattttatttaagactttgccattcttgggttttggttgcttggggtcatagttcaacgtcacgataaacgtgttatccggatcaatatccttgtcccagcgtttcttcaagtcggccttgataatctcagcggtactctggcttggagtcttgaacccttcggcggctttccagatgtacctttccacccctgggttatatggcaggcccggaatgagtgtttcgtgatggttgcgtcgtttggcgcttttctggcggggctcatgctcagcgccgggagcaggcggtgtggcaaggtttgccgagttgctgggtgactcgggcacagatgtcgaggcagggcttaggggcgtctttatcatttgatctcgctcttttgaagtgagcctccctggcagctatgtttcagagagatgcgtggcaaatgatcgtggggacgttccggccttacgttttgttcttttcacattgttgttacggcatacatgttttgaataaaactcttggatagtgcgttgctgcgatgaggtagggcgcgtttccagcgcactataaggaggaacggggaagtgatagcgttgtaacgcgaggtgagtgcggctttatatagatataattgcccccataaaaaaggcgcgtccattcaggacgcgccagatgccatagcatcaggtagcaagcatggctgttgattcaatggttacagccccttttgcccgttcagtgctttactgcagcacttcgatcacgccatcggcactcatgctgacctggctggtgccggcttccacttcgggcgtgggagccgaatcggccatcgcggctttcatcatcatcccgccacgggcgtaaggcatcgggtagccattggtgttgaagttcagattgacgatcttgtagcccttgccgcccagcgcatcggtggccagttgggcgcgagccttgaatgcggcgactgcatccttgagcagcgcatcttcgctggccttgcgcgtggtgtcagcgatggcgaagtccatgttttccattttcagggtattcagcagttcaccggtgagcttggacagcgcagggaagtccgcgctttccaggcgcagctcggcacgctcgcgccagccggtgatcttctggttcttgttgtcgtagatcgggtagctgttgcggctgccctggcgcagggttacgcctttgacttcgcgggcctggcccagcgccttgttcatggtggtggtgatttcggcggcgagcttggccgggtcgctgttctgggactcggtatacagcgtgacgatcatcttatcgcgggccacctcctggctgacctcggcgcgcagggaaatctggttgtagttcagcccttcggcggccacggccggaaggctggccagggtggcgaggccgagggtgataacagcggcactgcgagtgaaacgagacatgaaagctccttggggtggtcgtgttcggtatgactgtagacggtggcagcgggttcttcgggtttacacattacctacaagttgtggcgctgccgacgaacggtcatttgcccggtctgcggcaaagagccacacgtgccgtgccagcgggtcggcttcgtttatactcctgccgatccgcctgcagcgctcaccgggagagctcatgctcgccgccgtaaaactgacttccgccacccgccagaacctctggcgcctgacgttcatccgcacgctggtgctggccgcacaggctggctccgtcgggctcgcctattggttcgacctgctgccgctgccgtggctgcagctgggcgtgaccctcgggttctccattgtgctgtgtgtgttcaccgccatccggttgcgcaccacgtggccggtgaccgagctggaatatgccctgcaattggcttgcgacctgtttatccacagtgtgttgctgtatttctccggcggttccaccaatccgttcgtttcttattacctggtgcccttgaccatcgccgccgtgaccttgccgtggcggtattcggtggtgctgtcgggcatcgccctgaccctctacaccctgttgctggcgcgcttctatccgctgcaaaccttccccatcgcccgggaaaacctgcagatctacgggatgtggttgagtttcgcgctgtccgccgccgtcatcaccttcttcgccgcacgcatggccgaagaactgcgccgccaggaagagctgcgcgccattcgccgtgaagaaggcttgcgcgatcagcaactgctggctgtcgccacccaggccgctggcgccgcccatgaactgggtacgccgttggcgaccatgagcgtgctgctcaatgagatgacccaggaccatcacgacccggcgttgcaggaagacctcggcgtgctgcgcgagcaggtcaagcagtgcaagcagaccttgcagcaactggtacgcgccgccgaggccaatcgccgcctggcggtggagatgcaggatgtgacccagtggctcgacgaagccctgaaccgctggcacctgatgcgtcccgaagccagttaccgttttcatctattagggcagggcaccgtgccgcgcatggcgccgccgccggatctgacccaggccctgctcaacttgctgaacaatgccgccgatgcctgccccgaaggcctgggcgtgcagttggactgggatgccgaagacgtgaccatcagcattcgcgaccacggcgcgggcgtgccgctggccattgccgagcagatcggcaagccgttctttaccaccaagggcaaaggcttcggcctgggcctgtttttgagcaaggccagcgtgacccgcgcgggcggctcagtgaagctctatagtcatgaggaaggtggcacgctcaccgagctgcgcctgccccgtgtcgcacgaggagatatcgatgagtgacgagatccaagtcgaaggcgaagaactgccgcacctgctgctggtagatgacgacgccacctttacccgcgtgatggcgcgcgccatgagccggcgcggtttccgcgtcagcaccgctggatccgccgaagagggcctgaccatcgcccaggccgacctgccagactacgccgcgctcgacctgaagatggacggcgattctggcctggtgctgctgcccaagctgctggaactcgacccggaaatgcgcgtggtgatcctcaccggttattccagcattgccacggccgtcgaggcgatcaaacgcggtgcctgcaactacctgtgcaagccggcggacgccgacgatgtactggccgccttgctctccgagcacgccgacctcgacaccctggtgccggaaaacccgatgtcggtggaccgcttgcagtgggagcatatccagcgcgtgctgaccgagcacgaaggcaatatctccgccaccgcccgcgccctgggtatgcaccgccgtaccttgcagcgcaagttgcagaagcgtccggtacgtcgctgagcctgatctgaacaacagctgaacaatctgcttcaggccgcacggagcctcgaaccgatcaactatgatcggttcgaaagcctgtcatccttttccctaccgagcctggacaatgaatcagaacgctgagtattccgcggtcaatgacgcggtgcgtgggcaatttttacggcgggtgtgggggttgatcacgccttactggcgcagtgaagagaagggcatggcctggctgctgctgttggtggtgctggggctgtcgctgttcagtgtcgccgtgtcggtgtggttcaacagttggaaccgggatttctacaacgcgctggagcacaaggactacgacgcctttacccacctgctgatgtacttcagcgtgattgcggtggtggcgattgtgaccggcgtgttcacctcttatctgcaacagatgctcaccatccgctggcgccgctggctgacggaaagctactttgcccaatggctgggccacaagaattactaccacctggaatacggcggctacaccgataaccccgaccagcgtatctctgaagacctcaatgcctttaccgccagcaccctgaccctggggctgggctttatcagcaacctggtgagcctggtgtcgttctcggtgatcctgtggggcgtgtccggcagcatcgaagtgtggggcatcaccattcccggctacatgttttgggccgccctggtgtatgcggtgatcggtagctggttgacgcacttgattggtcgaaaactgatcggcttgagcaaccgtcaacaacgctttgaggctgacctgcgtttcagcctggtgcgggtgcgggagaacgcggaaagcatcgcgctgttcaacggtgagcccaacgagcgccagcagttaagcgcgcgtttcggacgggtatggagcaacttctggagcatcatgcagctcaagaagcgcctgaatttctttaccagcggttactcgcagatcgcgatcatctttccctttgtcgtcgcggccccgcgttactttgccggcaagatcgaactgggcgtgctgatgcaggtggcgcaggcgtttggcagtgtgcaaggcagcctcagttggtttgtcgacgcctacacgttgttggccagttggcgcgccacctgtgatcgtctgctgagtttcggccaagccatgcaagacaacgaaacccgcaccatgggcattggcctgcagcatcagggcgcggggttgcaggtcaaggacctgagcctggacctggccgacggtcgtcacctgctgcaaggcgccgacctgaccgttgccgagggcgagcgcctgatgctcagcggtcgctccggcagcggcaagtcgacgttgctgcgggcgatgggcaacctgtggcccaacggtcacggcaatatccgcctgccggccgagcgttatctgttcctgccgcagaaaccctatttgccgattggcacgctgaaggcggtgctgagttatccacaggacgacagcgtctacccggcggaacgttatgcacaggtcctggaaacctgccgcctgccccatctgatcgggcgactggacgaagcgaaccactggcagcgcatgctctcgccgggcgaacagcaacgcctggcgtttgcccgcgccttgttgtttgcaccgcaatggctgtacatggacgaagcgacgtcggccatggacgaagaggatgaggcaacgctgtatcaagcgttgatcgatcagttgccggggctgagcatcgtcagcgtcggtcatcgcagcagcctcaagcgcttccatgggcggcatgtgcggatcgagggggggcgtcttcaggaacaactactggcttgagtcctttaggtcgatgtgggagtggggcaagccccctcccacaacaaaaagcccggctgatcatcgatcagccgggctttttagtgcttgaagattaggttacttcttcaaaccgtaatgctcatccagcatgccaggggcgttcggcgtttttggcgcgtagtcccgtggtggctcctggttttcccgcggaggggtcaggcgctcccgtggggtttgcggtgcatcggaatgcaacgcggccagcaggcgctggcgggtgatgtcgtcgagggcgaggcggttggcgccatcggcgagatgatcctgtacttcctggtagctctgggtgagcttcttgaccagggtcgcggtgctgttgaagtgggtaacaacctcgttctgataactgtcaaaacgttcctggatatcatccagctgacgttgcgtgcggttaggcgcggcattcggcagcaagcgagcaaccaggaaaccaatggcgacaccggcaaccagggcaagagtcggcaacaaccaaactaagagcgagtgttccacgagtccttcctctataaacggctttgctttacgttaacggctcaaacctgcgctgtataccgcgattaagctcgcaatgatgccatgcacagacttttagctagacgagtcgaccctttgagaggtcacggagttcattccttgctcatgcgtgaaacccccgttttgatcgatggcccggtaggtcaattggaagccctgtacctggatcaccccgagccacgtggcctggcactgatctgtcaccctaacccggtgcagggcgggaccatgctcaataaagttgtatcgaccctgcaacgcaccgcccgcgatgccggtttgatcaccttgcgtttcaattaccgtggcgtcggcgcgagtgccggcacccacgacatgagcaccggtgaagtggacgatgccgaagcggctgccacctggctgcgggaaaaacaccccgacctgccgatcaccttgctcgggttttccttcggtggctacgtggccgccagcctgggtgggcgcctggaggccaagggcgaaaagctctcgcacctgttcatggtcgctgcggcggtgatgcgccttcgcgataccgatgcgttgccacaaggctgcccattgaccctgatccagccggaaaccgacgaagtggtcgacccgcagaccgtctacgactggtccgccgccttgaatcgcccccatgagctgctgaaagtggcagaatgcggacacttttttcacggcaagctcaccgatctgaaggatctggtgctgccgcgactctcgaattgatagcagtctgataagcgattacccatgacgactcgtacccgtatcctcaccggcatcaccaccaccggcacgccgcacctgggcaactacgccggtgcgatccgcccggcgatcctcgccagccaggacgccaatgccgactccttctacttcctggccgactaccacgccctgatcaaatgcgatgacccgcagcgcatccagcgctcgcgcatggaaatcgccgcgacctggctggccggtggcctggatgtgaaccgggtgacgttctatcgccagtcggacatcccggaaatccccgagctgacctggctgctcacctgcgtggccgccaagggcctgctcaaccgcgcccacgcgtacaaggcctcggtggacaagaacgtggaagccggcgaagacccggatgcgggcatcagcatgggcctgtacagctacccggtgctgatggcggcggacatcctgatgttcaatgcgcacaaggtgccggtggggcgcgaccagatccagcacgtggaaatggcccgcgacatcggccagcgtttcaaccacctgttcggcaacggtaaagaattcttcaccatgcccgaggcgttgatcgaagaaagcgtcgccaccttgccgggcctggatggccgcaagatgtcgaaaagctacgacaacaccatcccgttgttcaccagcgccaaggacatgaaggacgccatctcgcggatcgttaccgactcccgcgccccgggcgaagccaaggacccggacaattcgcacctgttcaccctgtaccaggcgtttgcgaccaaggcgcaggaagaagaattccgtgccgaattgctgcaaggcctgggttggggcgaggcgaagaaccgtctgttccaactgctcgacggccagttgggtgaagcccgcgagcgctaccatcaactgatgtcgcgcccatcggacatggaagacctgctgctggtcggcgccaacaaggcccgtgccgtggcggcgccgttcctggccgagctgcgtgaggcggtgggcctgcgttcgttcgtcaaccaggctgcggcgcccgtggcgaccaagaagaaagctgcgaaggccgcacgcttcgtcagttttcgcgaagacgatggcagcttccgctttcgtctgctggccgctgatggcgagcaactgctgctgtcgcgcaacttcgctgacggtaaagcggccggcgcggtgaccaagcaattgcaaagcggcgacgcgctggacctgcgcaccgaggccctgggcttcagcgtatggctggacggtgccgccgtggccgatagcgccgcgttcgccgacgaagcgtcgcgcgatgctgccatcgccgccttgcgcgttgcgttgacccccctcgaggattaacccgaccaagggttgattgccattatccagggccgtcgttacagtgacggcccgtttttgttgccttgctaacgaaattatgacgcccctagaacgatatcaagctgatctgaaacgccctgaattcttccatgacgcggcccaggaaacggcggtgcgtcatttgcagcgcctgtacgacgacctgctcgcggcctcgcaaagcaagccagggatgttcagcaagctgtttggcaagaaagaccacacgccggtcaagggcctgtacttctggggtggcgtgggtcggggcaagacctacctagtggacacttttttcgaagcgctgccgttcaaggaaaaggtacgtacgcacttccaccgcttcatgaagcgcgtgcacgaagagatgaagaccctgccgggcgagaaaaacccgctgaccatcatcgccaagcgtttctctgaagaggcgcgggtgatctgcttcgatgagttcttcgtgtccgacatcaccgacgccatgatcctcggcaccctgatggaagaactgttcaagaacggtgtgaccctggtcgccacttcgaacatcgtgcccgacggtttgtacaaggacggcctgcaacgcgcgcgcttcctgccggccatcgcgctgatcaaacagcacactgaaatcgttaacgtcgacagcggcgtcgactaccgcctgcgtcacttggagcaagcggagctgttccatttcccgctcaatgaggcggcccacgacagcctgaaaaagagcttccgcgccctcacgccggaatgcacccaggcggtggaaaacgacaagctgatgatcgagaaccgcgaaatcatcgcgctgcgtacctgcgatgacgtggcctggttcgagttccgccaactgtgcgacggcccgcgcagccagaacgactacatcgaactgggcaagatctttcacgcagtgattttgagcggtgtggaacagatgagcgtcaccaccgacgacatcgcgcgccgtttcatcaacatggtcgacgaattctacgaccgtaacgtgaagttgatcatctcggcggaagtcgagctcaaggacctgtacaccggtgggcgcttgaactttgagttccaacgcacgttgagccgcttgctggagatgcagtcccacgaattcctgtcgcgcggccacaaaccctaagatcgatgtagatcaaactgtgggagggggcttgccccctcccacatttgccttgtgtacgctctgactcaggcagcctgctggaattgctggcggtactggtttggcgatagctcggtgtgttgcctgaacaaccgcgcaaagaaactcgcatcgtcgtaacccacctcataactgatggtcttgatgctcttgcggctgcccgagagcaggcctttggccgtctcgatccgcaggcgttgcaggtaatgcagcggcttgtcgccggtggcggtctggaagcggcgcatgaagttgcggatgctcatgccgtgttcccgggcgacgtcttcgaagcggaacttgtcggcgaaatgctcttcgagccagtgctggatctgcaggatgatcacgtcctggtgcagcttctgaccaccaaacccgatacgtcccggcgagtagctgcgctgcacctcgtagagaatgtcgcgggccacggcctgggcgatgttggcgccgcagaagcgttcgatcaggtagatgtagaggtcgcacgccgaggtagtgccgccggcgcaatacaagttgtcggcgtcggtgaggtgcttgtcctggttgagctggaccttggggaagcgttcgctgaaggcattgaagaagcgccagtaggtggtcgcttccttgccatcgagcaggccggcttcggccagccagaacaccccggtggcttcgccgcagagcaccgcaccgcgtgcatgctgttcgcgcagccacggcagcacttgcgggtagcgggtgcacaaggtgtcgaagtcatcccagaaggccggcagcacaatgatgtcggcgtcttccaggccgccgtctaccggcatgatcacatcactgaaactgcacaccgattgtccatcggggctgaccaggcgtgtttcaaacccgggcgtcaggcccaggccttgttgcttgccgtaacgcaggctggcgaggtggaagaaatccttggcttgcatgagggtggaagcgaatacccgatcaatggccaaaatgctgacgcgccgcaagggcgtggagatttggttagacataatttcatttattcttataggggaaagtggtcaccagacggctggatcgtcttattttttgtcgcatgtgtccagtgtcccgtgctgctttcgcggcatagtctctgtgggctcgctcttgtccgacaatccacgcaggtgacccatgattcccagaaccttgttcagcccggaacacgaactcttccgcgagagcgtgcgcaccttcctcgaaaaggacgccgcgcctttccatgggcaatgggagaaacagggctatatcgaccgcaatttgtggagcagggcgggggaggcgggcatgttgtgttctcacctgccggaggaatatggcgggctgggtgcggactttctatacagcgcggtggtgatcgaagagatcagccggctgggcctgaccggtatcggcttttccctgcattcggacattgttgcgccgtacatcctgcattacggcagtgaagcgctgaaacacaaatacctgcccaagttgatctccggcgagatggtcacggcgattgccatgaccgagccgggggcgggttccgacctgcaaggtgtgaagaccactgcggtgctggacggcgacgagtatgtgatcaacggttcgaagacgttcatcaccaacggctacttggccgagttggtcatcgtggtcgccaagaccgatcccaaggccggcgccaagggtaccagcctgttcctggtggaggccgacacgccggggtttgccaagggcaagcgcctggagaaggtgggcatgaaggcccaggacacctcggagctgttcttccaggatgtgcgggtgcccaaggaaaacctgctgggccaggccggcatgggcttcgcctacctgatgcaggagctgcctcaggaacggttgaccgtggcgattggcgctttgtcgtcagctgaggcggcgcttgagtggaccctggattacacccgcgagcgccaggcgtttggcaaagcgattgcggatttccagaacactcgcttcaagttggccgagatggctaccgagattcagatcggccgggtatttgtcgacaagtgcatggcgttgcacctggaaggcaagctggatgtgcccacggcggcaatggccaagtactgggccaccgacctgcaatgcaaggtgctcgatgagtgcgtgcagttgcatggcggctacggcttcatgtgggaatacccgattgcccgggcctgggcggatgcgcgggtgcagcggatttatgcggggaccaatgagatcatgaaggagatcattgcgcgggcgctttgattgggcggttctgctgatggccaaatcgggggcaagccccctcccacacttgaatgtattcacagatcaaaatgtgggagggggcttgcccccgatagcggtcttaagatcaatcaaggcgctgggttcgggtgatccttctgaatcgcctcaatcccttccaatacctctttcgacagtttcagatccgcactggcaatgttgctatccagttgctccagcgacgtggcaccaatgatattgctggtcacaaacggctgctgtgtcacaaacgccagcgccatctgcgccgggtccagcccatgttcccgcgccagtgcaacgtaacggctgcatgccgcttccgactgcgggttgaagtaacggctgaagcggctgtattccgtcagtcgtgccttcgctgggcgggcgccattctcatacttgccgctgagcatgccgaacgccaggggggagtacgccagcaggccgcattgctcgcgaatcgcgacttccgccaggcccacttcaaagctgcggttgagcaggttgtaggggttctggatcgacaccgcacgcggccagccgcgggcttcggccagggcgaggaatttcatggtgccccacggggtttcgttggacaggccgatgtgacggatcttgccggccttcacctgctcatccagcgcttcgagggtttcttccagcggggtgaggttgtcttcgtccttgtgcttgtagctcagttggccgaagaaattggtgctgcgctccggccaatgcaactggtagaggtcgatccagtcggtctgcaggcgtttgaggctggcatccagggcttcgacgatgtgcttgcggttgtggcgcaggtggccgtcgcggatgtagtcgatggtgttgccggggccggcgatcttgctggcgaggatccagtcggcgcggtcgccacggctcttgaagtaattaccgatgtaacgctcggtggtggcataggtgtcggccttgggcggcaccgggtacatttcggcggtgtcgaggaagttgatccccgcgcctttggcccgctcgatctgcgcgaaggcctctgcctcgctgttctgctcgccccaggtcatggtgcccaaggctatcgcgctcacgttcagatccgtacggcccagctgtcgataatccatcgggtactccttcagggaaaacaatcataaaagcaggttgaattttttttcgcaatctgcataattgcccacctctttctgcagtggaagtgatgcgccgcctgccgaagaatcttgccgttgaacggacgcgccgacccgagcccccgatagcgtctgtatccggctgcctttgacttgtcaaagtacgcactattcagtaagatccgccgtctaatttacagggcggcccctgaggctattaaagaatgacaacttttactgcaaaaccggaaacagttcagcgcgactggtttgtcgtcgacgccgctggtcagaccctgggtcgtctggccactgaagtcgccagccgtctgcgtggcaagcacaagcctgagtacacccctcacgttgacaccggtgactacatcgtgatcatcaacgctgagcaggttcgtgtaaccggcaacaaagcaagcgacaaaatgtactaccgtcactccggtttcccaggcggtatcaagtcttccaacttcgaaggcctgattgccaagaagcctgaagccccgatcgaaatcgcggtcaaaggcatgctgcctaagggcccactgggtcgcgatatgtttcgcaagctgaaagtctatgcgggcgctgtacaccctcatgctgctcagcagccccaagaactgaagttttaacggaatagttcattatgtcggcgactcaaaattacggcactggccgtcgcaaaaccgcaaccgctcgcgttttcctgcgtccgggtactggtaacatctcgatcaacaaccgctccctggacaacttcttcggccgcgaaactgcccgcatggtagttcgtcagccgctggaactgaccgagaccgttgaaaagttcgacatctacgtcaccgttatcggtggcggtgtaagtggtcaagctggcgcaatccgccacggtatcactcgcgctctgatgcagtacgacgaaaccctgcgtggcgctctgcgcaaagctggcttcgtgactcgcgatgctcgtgaagttgaacgtaagaaagtcggtctgcgtaaagcgcgtaagcgtccgcagtactcgaagcgttaattcgctttacgttccacaaaaacgcccagcctcctcacggagctgggcgttttttattgcctgcgatttatgcagaaaaatcgccgtgacaacttgccacatccgtagaccccctatactacaaggcctggaggcggagccccgggcaattcccttgtcagacgtggggcttttcattaccattcggcaaaatttttataagtaaagattcaacacttagtagacgcctgatttaacaggccaaaaagctgatgggagaggactgaatgagcaatgacggcgtgaatgcaggccggcgtcgcttcttggtagcagccacatccgtggtgggtgctgcaggagcggtgggggctgcggtcccgttcgtggggtcatggtttcccagtgccaaggcgaaagccgcaggtgcaccggtgaaggtgaatatcagcaagatcgagccaggccagcagatgattgctgagtggcgcggccagccggttttcattgttcgtcgtaccgaggaaatcctgggaaatctcaagaagatcgaaggccagttgtctgaccccaaatccgagaaatccgaccaacccgcctacgccaagaatgaagtgcgttcgatcaagccggagatcctgctgctggtcggtctctgtacccacctgggttgctcgcctaccttccgcccggaagtggccccggtcgatctgggcaaggattgggtcggcggttatttctgcccctgccacggctcccactacgacctcgctggccgtgtctacaaatcccagcctgctccgctgaacctgccggttcctccgcatacctacgaaactgacgacctcattgtcattggcctcgataaggagaacgcgtgatgagcaagttcatggattgggtggatgcgcgcttccccgccactaaaatgtgggaagaccatctcagcaaatattacgcgccgaaaaacttcaacttcttctacttcttcggctccctggccctgctggtgctggtcaaccagatcgtcaccggcgtctggctgacgatgagctatacgccgtcggcagaagaagcgttcgcttccgtcgagtacatcatgcgtgacgtcgagtacggctcgatcctgcgcctgctgcactccaccggcgcctcggcgttctttatcgtcgtctacctgcacatgttccgtggcctgctctacggctcgtaccagaagcctcgcgagctggtgtgggtgttcggcatgctgatctacctggcgctgatggccgaagccttcatgggctacctgctgccgtggggccagatgtcgtactggggcgcccaggtgatcatctcgctgttcggtgcgatccctgtgatcggcaacgacctgacccagtggatccggggcgactacctgatctccggcatcaccctgaaccgcttcttcgccctgcacgtggtggccttgccgatcgtgatcctgggcctggtggtgctgcacatcctggcgttgcatgaagtcggctccaacaacccggatggcgtggacatcaagaagcacaaggacgaaaacggcatcccgctggatggcattccgttccacccttactacaccgtgaaagacattgtcggcgtggtggtgttcctgttcgtgttctgctcgatcgtgttctttttcccggagatgggcgggtatttcctggaaaagcctaacttcgaacaggccaacgccttcaagacacctgagcacattgccccggtgtggtacttcacgccgttctacgcgatcttgcgcgcgatccccgacaaactcatgggcgtgatcgccatgggcgcggccattgctgtgctgttcgtgttgccctggctcgatcgaagcccggtcaagtccatgcgctacaagggctggctgagcaagatctggctgtgggtgttctgcattgcgttcgtgatcctaggtgtactgggcgtattggcaccaacccctgagcgtacgttgctgtcgcaggtctgcaccttcctgtacttcgcctacttcattctgatgccgttctacacccggctcgagaagaccaaaccggttccggaaagggtgactggctgatgaaaaagttatttgttgctttgatgcttgcggccctgccgctcctgtccttcgccgccgaacacggtggcccggcgctggaaaaagtcgatatcgacgtgtctgacaaggcagccatgcaagacggcgcgcgtacgttcgccaactactgcatgggttgccacagcgccaagttccagcgttacgagcgggtggccgatgacctcggtatcccccatgaaatgatgctggagaagctggtattcaccggtgccaagattggcgaccacatgaccatcggcatgaagcccgccgacgccaagacctggttcggcgcggcaccgcccgacctgaccctggtggcacgtgtacgcggcaccgattggctctacggctacctgaaatccttctacgaagacccggcgcgcccttatggcgtgaacaaccgtgtgttcccgaacgtcggcatgcctaacgttctggtcggcctgcaaggcaagcaagtggtaggatgcaagcagattcaggtcgttgaagacggcaagaagcaatacgatccgttgactggcacgcctttgactcatgaagcgtgcgatcaactgaagatagaagccccaggttcgttgacagacgagcagttcgacgagaaggtcaagaacctcgtgaccttcctggcctactcggccaacccggtcaaactgcagcatcagcgcatcggtacgtatgtgttgctgtacctggccttcttcttcgtattcgcctatctgctcaaacgcgaatactggaaggatgtgcattgatccaaccgtaagcaattgctgttaatcttgcgcgcccagcggcatctctgaatacgtagcggtctggttgtaccaggcgttacagagatgctctctgggcgcgctcgtttttgagctttcgataatttcaacaagcgaggaggaccgccatgggcgtgaccaaccggttggcctgttactccgaccccgccgaccactattcccaccgagtacgtatcgtgctcgcagagaagggtgtcagcgccgagatcatcagtgtggaagcaggtcgtcatccacccaaactgatcgaagtgaacccctacggcagcttgcccaccctggtcgatcgtgacctggcgttgtgggagtcgaccgtcgtgatggaatacctggatgagcgttacccgcatccacccttgctgccggtgtacccggtggcgcgtgccaacagccgcctgctgatccatcggatccagcgtgactggtgcgggctggtggatgtgatcctggatacccgcagcaaagaagcggcacgtgtacaggcgcgtaaggaattgcgcgagagcctgaccggcgtttcgccgctgttcgccgataagccttttttcctcagtgaggaacaaagtttggtggattgctgcctattaccgatactctggcgtttgccgattcttggtattgaactgccgcggccagccaagccgctgcttgattacatggagcgccagtttgcgcgtgaggctttccaggcgagtctgtctggtgtcgaacgcgatatgcgctaaggcttaaggagccgctgatgaactccagtcgaccctacctggtccgcgcgctctatgagtggattgtggacaacgattgcaccccgcacatgctggtcaattcggaatttcctgcggttcaggtaccgcagggttttgccagcgacgggcagattgtgctgaacgtatcacccagtgccgtacgccatctgcacatggacaatgaagcggtcagcttcgaagggcgtttcggcggtgtgccgcatacgctgtacgtgccgattggcgccatcctcggcatctatgcccgggagaacggccaaggcatggtgttcgatctggagtcgcctttcgaggacgacgaatcgatcgaaagcgaagagggtgatgatcagccgccaccagactccgagccaccgcgccccagcggccggccgagcctgaaagtggtgaaatagccggcgttcccctcggggttagccgaaaaaaagcctcgacctgtgtcggggcatttttttgcgcgaaggatgtagatgaaagtcgcgcccggacggtgatcgtacaaccaccatgggctatgatgcgtgctcaagttcgccgagaaagatgattcatcatggaaaacgccaacaccgcccctcgtcttccccgcaagcgccgcagccttgcccaggaattggtcacggtgttgtccgagcagatccgcgacggccagctcaagcggggcgacaaactgcccaccgagtcggcgatcatggacgcccatggcgtcagccgcacggtggtgcgtgaagccatctcacgcttgcaggcggcagggcaggtggaaacccgtcatggtatcggcacctttgtgctggacacgccgagcccgagcggctttcgcatcgacccggctaccgtggtgaccctgcgtgacgtgctagcgattctggaattgcggatcagcctggaagtggaatccgccggcctggccgccttgcgccgcagcgatgaacaactggccgccatgcgtgcggcgttagatgccctgaatgaaagcgcggcccacgccggcgatgcggtggcctccgactttgccttccacctggaaatcgcgctgtccaccggcaaccgctacttcaccgacatcatgacccacctgggcaccagcatcattccgcgcacccgcctgaattcggcgcgcctggcccatgatgaccagcagcactacatgagccgcttgagccgtgagcacgaagagatctatgaggcgattgcccgccaggattcggatgcggcgcgggcggcgatgcgcttgcacctgaccaatagccgcgagcggctgcgccatgcccatgaagaggcagaggcgcagcgcatctagaagtgctgcctgtaggcgcggttgtcagtttgtcggggtgtttggcttgtagtccttgagcagcaggtaagtgctccacccccaccaatcattcgtccagcgcttgtcgttcaggtcattcacatccttgcggcgcagcaccttgtctccctccatcttgaacagcggcgaaaagttgttcgccgggttctgtgccgcattcaggtcgggcacatacagcggtgccttgaagttggccggggagggcgcggcaccactgataaacgtatcgaagatctcatcggctgaagcttgcaccgcacgtttgacctgcatccggttgtccgcatcgatatcatcgaagtagcgcttgtccccatacgcgtgccattgatcgcccagggcattgcgcactttcagcccgaatttgctgtcttcatcgtgcatgaagcggctgatcagcgaacccagttcaccgggtgtcaccaccgctgccagttgtttgcgcggtacacgcaagtggcctgccgaaaacagatcggtcaaaaagtgatcagcaaagctgttcatggcataggccagttccagcgcctggtcggtaccgatctggtgcgccacgacggcttgttgcagcgccactgtgtgccccgccaggtacgcggacagcgcccattcgccgaagtggtcggcattgtctgccgccagcttcaggtagcggcccagtgggatcagcgctgacaccgcactgccaccgccggtgatgcggttccattcctcagacaacgtatcacccaaggcgtcgtaggcttcatgggcctgcttgccatccttgatcgcttgcttgactgcattgatctccttttgcatcaccgcgaggatcttgtgcgcttcttcccgcgaggcgggtagcgcggcgagcgtgttgaaagcagcggaaaagcgttgcacacgttcggcaggggaggcgccatcactgatgggctggccggggatgccatagaagtcgccgcccaaggcaatgatctggccataggtcaacgccagcccgttgggcaggtgcagctcgacttggcgggcgggaattgccggggcgtccttggcgaagcgcagtagcgtgtcgtcgccgatggcggtgtgttcacccccttcgaaacgcaggacaggtggttttttttcggatactgcgagatcaagacctgacatgttagctccttgctatgtcgtaggaatcttccttaattactgtatgtatatacagttttatcgagcatagagtaaaaacttcctacgtcaagacggtgctcttcaacccctcgttgaatgaagtctgatgaattgcagttgacgaatctttttatagttgtacgatgacgtacgacatcaccaaaaccaacaacaacctttcgatagaaagtcttcgcccagggtgttcgaataatgaatccacaagaactgaagtccatcctctcccacggtctgctgtcttttccggtgaccgatttcaatgcccagggtgacttccaccaggcgggctacatcaagcgcctggaatggctcgccccttacggcgccactgccttgttcgctgccggcggcaccggtgagtttttctccctcgccgccagcgaatattcccaggtggtgaaaaccgccgttgatacttgcgctaccagcgtgccgatcctcgccggtgtcggcggttcgacccgccaggccatcgagtacgcccaggaagccgaacgcctcggcgcaaaaggcctgctgctgctgccgcactacctcaccgaagccagccaggacggcgttgccgcccacgtagaagcggtgtgcaagtcggtcaaaatcggcgtggtggtctataaccgcaacgtctgccgcctgactgcgccgctgctggaacgcctggccgagcgctgcccgaacctgatcggctacaaggatggcctgggcgatatcgaattgatggtgtcgatccgccgtcgcctgggtgaccgtttcagctacctcggcggcctgccgacggcagaggtttacgccgctgcctacaaggccctgggcgtgccggtgtactcctcggcggtgttcaacttcatcccgaaaaccgcgatggatttctaccacgcgattgccaaggacgatcacgccaccgtcgccaggatcatcgacgacttcttcctgccgtacctggatatccgtaaccgcaaggccggttacgcggtaagcatcgtcaaggcaggtgcaaaaatcgccggctacgacgcaggcccggtgcgcacgccgctgaccgacctgctgccggaagaatacgaagccctggccgcgctgatcgacaagcaaggcgcgcaataacctatctacaaggccgctgagcaatcagcggccttttgcgtcaggagaagatttgtgtcccaagcccaacgtttcgataactacatcaatggccagtgggtggccggtgccgactattgcgtcaacctcaatccgtcggagttgtccgatgtcattggcgaatatgccaaggctgatgttgcccaggtcaacgctgccatcgatgctgcccgtgctgcatttccggcctggtcgacgtccggcatccaggcgcgtcacgatgccctggataaagtcggcagcgaaatcctcgcccgccgcgaagaactcggcaccctgctggctcgcgaagagggcaagaccctgcccgaagccatcggcgaagtgacccgcgccggtaacatcttcaagttcttcgccggcgaatgcctgcgtctgtccggcgactacgtgccgtcggtacgcccgggcgtcaacgttgaagtcacccgtgaagccctgggtgtggttgggctgatcacgccgtggaacttcccgatcgctatccccgcctggaagatcgccccggccctggcctacggtaactgcgtggtgatcaagccagccgagttggtgccgggctgtgcctgggccctggcggaaatcatttcccgcgccggtttccccgccggtgtattcaacctggtgatgggcagcggtcgcgtggttggcgacgtgctggtcaacagcccgaaggtcgatggcatcagtttcaccggttctgtgggtgttggacgccagattgccgtcagctgcgtctcgcgccaggccaaagtgcagttggaaatgggcggcaagaacccgcagatcatcctcgacgacgccgacctcaagcaggccgtcgagctgtcggtacagagcgcgttctactccaccggccagcgttgcaccgcttccagccgcttgatcgtgaccgccggcatccacgaccagttcgtcgcggccatggccgagcgcatgaagtcgatcaaggtcggccatgcactcaagagcggcacggacatcggcccggtggtttcccaggcccagttggaccaggacctcaagtacatcgacatcggccagagcgaaggtgcgcggctggtcagcggtggcggcctggtgacctgcgacaccgaaggctactacctggcaccgacgctgtttgccgacagcgaagctgcgatgcgtatcagccgtgaagagatcttcggcccggtggccaacgtggtgcgcgtggcggactacgaagcggcgctggccatggccaacgacaccgagttcgggctgtcggcgggcattgccactacctcgctcaaatacgccaaccacttcaagcgccactcccaggccggaatggtgatggtcaacctgccgactgccggcgtggattaccacgttcctttcggtggccgtaagggctcatcctatggttcgcgtgagcaaggtcgctatgcgcaagagttctacaccgtggtgaagaccagttacatcggttcgtaacacgcatcactttgtgggagccggatgcctgccggctcccacattaaaaacagaaaaccattacccgcaaaaaaaataattagtgggagtacttctacatgcaagcgaccaagccgacccacgtccgctatttgatcctgctcatgctgttcctggtgaccacgatcaactacgccgaccgggccaccatcgccatcgcgggctccagcctgcaaaaagacctcggcatcgacgcggtcaccctcggttatatcttctccgcattcggttgggcctacgtggccgggcaaattcccggtggctggctactggaccggttcggctcgaaaaaagtctatgccttgagcatcttcacctggtccctgttcactgtgctgcaaggctatgttggtgaattcggggtctccaccgccgtggttgcgctgttcatgctgcgtttcatggtgggcctggctgaggcgccgtccttccccggcaacgctcgtattgtggccgcctggttcccgactgctgagcgcggtacggcgtcggcgatcttcaactcggcgcaatactttgccaccgtgctgtttgcgccgctgatgggttggatcgtctacagcttcggctggcagcatgtgtttatcgtgatgggcgtgatcggcatcattttctcgctgatctggctgaaagttatccacagcccgcgccagcacccgatgatcaacgaagctgagttcaaccacatcgcggccaacggcgccatggtcgatatggaccaggacaaaggcaagggtaagaaaaccgatgggccgaagtgggattacatccgccagttgctgaccaaccgcatgatgctcggcgtgtacctgggccagtactgcatcaacggcatcacctatttcttcctcacctggttcccggtgtacctggtgcaggaccgtggcatgaccatcctcaaggccggtttcatcgcctcgttgccggcgatctgcgggtttatcggtggcgtgctcggcggggtgatttccgactacctcttgcgcaagggccattccctgactttcgcgcgcaaggcgccgatcatcggtggcctgctgatctccagcagcatcgtggcctgcaactacgtggatatcgaatggatggtggttggcttcatggccctggccttcttcggcaagggcgttggcgcactgggttgggcggtggtgtccgacacctcgccgaaacaaatcgccggcctcagtggcggcttgttcaacaccttcggtaacctggcgtcgatcaccacgccaatcgtcatcggctacatcatcagcaccaccggctcgttcaagtgggccttggtgttcgtgggtgccaacgccctggtggcagtgttcagctacctggttatcgtcggcccgatcaagcgcgtagtactcaaagagccgccaagcaaggggcctgagttgaccaacctaaccgaagcgcattcctgaggggcgatgtaatgcagttgattgaacatgccgactcgccgcgctcgattcgtttgcacgagcgcgacaacgtagtgatcgtggtcaatgaccagggcgttccggccgggaccgagttcccggacggcctggtgaccgtggatttcatcccccagagccacaaagtgaccctggaagatatccccgaaggcggccagattattcgctacggccagaccatcggttacgccctggcgccgattccacgcggcagctgggtgcaggaggatcaactgcgcatgcccaccgcgccaccactggacagcttgccgctgtccaccgaggtgcctgaaacccaggcgccgctggagggctttaccttcgagggttatcgcaacgccgatggcaccgtgggtacgcgcaatatccttgggatcaccaccacggtgcagtgcgtcacgggcgtgctggaccatgcggtcaagcgcatcaaggatgaattgctgcccaagtacccgcatgtggatgacgtggtggcgctgacccacagctatggctgcggcgtggcgatcaccgcgacggatgcctacatcccgatccgcaccgtgcgcaacctggcgcgcaaccccaacctcggcggtgaagccctggtgatcagcctgggctgcgagaaattgcaggccgggcaggtgatgcacgacaacgacagctcggtcgacctgagtgagccctggctgtatcgcctgcaggactccagccacggttttaccgaaatgatcgagcagatcatggagctggccgagacgcgcttgaagaaactcgaccagcgccgccgcgaaaccgtgccggcgtccgagttgatcctgggcatgcagtgcggcggcagtgatgcattctccggcatcaccgccaacccggcgctgggctatgcctcggacttgttgctgcgggcgggggcgacggtgatgttttctgaagtaaccgaagtccgcgatgccatctacttgttgacgtctcgcgctgaaagcaaagaagttgcccaggagctggtcagggaaatggattggtacgaccgttacctggccaagggcgaggcggatcgcagtgccaacaccacgccgggtaacaagaagggcgggttgtcgaacatcgtcgagaagtccttgggctccatcgtcaagtccggtagcagtgcgatcaacggtgtgcttggcccgggtgaacgcttcaagagcaaaggcctgatcttttgcgcgacgccggccagtgactttgtgtgtggcaccttgcaactggcggcggggatgaacctgcatgtgttcaccaccgggcgtggcacgccttacggcctggcgatggcgccggtggtgaaggtgtcgacgcgcacggagctggcgcagcgctggccggacctgatcgatatcgatgccgggcgcattgccaccgggcgtgcgaccatcgaggagctggggtgggagttgttccacttctatctggatgtggccagcggcaagaagcagacgtgggcggaacaccacaagctgcacaacgacatcaccttgttcaacccggcgcctattacctgagaccgagtcgcctgcatcgggggcaagccccctcccacattttgaacggtgagcaccgtcagaggtgggagggggcttgcccccgatagcggtagaccagacgaagcggcctacactggcttatcattagccacctaacgacgctcaccaaggttctccccggcatgctggcaattttcctctccaccctcaccatcaccgcgccggtgtttgccatgctgttcctgggtgtgttgctcaagcgcatccactggatcaacgataactttatccacacggcctcgtccctggtgttcaacgtcaccatgccggcgttgctgttcctcggcattctgcatgccgacctgcacgcggcgctcaagccgggcttgctgatctattttgccgtcgccaccttgctcagctttgccctggcctggggttgggcgatctttcgttgcccgcgtgaagaccggggcatctacacccagggggcgtttcgcggtaataacggtgtaatcggcctggcgctggccgccagcatgtacggcgactacggcatctccctcggcgcgatcctcgcggcgctggtgatcctgttctacaacacgctgtcgaccatcgtgctggcggtgtacagcccggtgatcaagtccgacccatggagcatctgcaagagcgtgctggccaacccgttgatcatcagtgtgatcgcggcggcgccgttcgcctatttccagatcggcctgcccggctggctggaaaagtccatgcagtacctggcggacaccactttgccgctggcgttgatctgcatcggcggcaccttgtcgctggcggcactgcgcaagagcggcaacatggcgctgagcgcgagcctgatgaagatggtctggctaccggtgatcgccaccctgggcgcgtggctgctgggctttcgcgggccggagttggggattctgttcctgtacttcggcgcaccgacggccgcggcgagcttcgtgatggccagggcggccgagggcaaccatgaactggcggcggcgattatcgtgatcaccaccttgatggcggcggtgaccacgaatatcgggatctttgtgttgcaggcgggtggttggatctgaacgttcgggtgcctgtgagggccaatcgggggcaagccccctcccacattggacggggaatacattcaaggtgggagggggcttgcccccgatagctatctgaccgtcactgctgatctgtctgatacgcgtcgatcacttcctgggcggcacggaacgcatcaatcgctgccggcacaccggcatacaccgcgcaatgcagcagtgcttcgcggatttcctccacggtgcaaccgttgttcagtgcgccgcgcacgtggcccttcagttcctgtgggcacttgagcgcggtcagggcggcgagggtgatcaggctgcgggtcttcagcggcaatccttcgcggttccacacgctgccccaggcatgttcgttgacgaaatcctgcagtggctggctgaactcggtggcattgcccagggcgcggtcgacgaacgcatcgcccatgacctgacgacgcatttccaccccgggcttcttctgatcggtcattgcggttccctcttgtgttggcggcgccaggctcgcagcgtgctgaacaacagaaaagccaccagcactggcaggacgtaatacagcatcagttgttcaagcttgttggccaggggcatgcccgtggtgaacgccatcacatgcagcccgtacgccaggtacaggcccagcagcaccaggccttcggcgcgggtcacgcggtaaccggtgtagaacaccggcaggcacagcaccaccacgccgagcatcaccggcaggtcgaaatccagggcgttgggtgataccgacagcggtgatggcgcgagcagggcggtcaggcccaatacaccgagcaggttgaacaggttgctgccgatcacgttgcccacggcaatgtcacgttcgccgcgcagggcggcgatcagtgacgtggccaggcagggcagcgaggtgccgacaccgatcagggtcaggccgatcacacgctccgacaggcccaggtcgctcgccacgtccaccgccgcgcccaacagcaaatgcccggccagtaccagcaccagaaaaccgccgagcatcaacagcacgctgctcagccagggcgcgctggccaccgtatccagcgtgcgcgggcggcgggagtggcgcgtctggtagtgcaatacgccgaggtaagcgagcagggcaacgagcagcatcaggccgtcgctgggcgtgagttcttcgttggccgccagggtgaacaccagcagcccggccaggatcatcacggggatgtccaggcgcaccaattggcgtgagacccgcagcggaacaatcaacgccgacaggcccagggtcaccaggatgttgaagatgctgctgccgatcacgctgcccacggcgatatcggtattgccggccagggtggcttgcaggctgacagtcatctgcggcgcgctgctgccgaaggcgacgatggtcaggccgatgatcagtggccgcactttgaggctcgcggccaggcgcacggcggcgcgcaccaggatttcggcaccgaggatcagcagcaccaggccgctgaccaattccagcaggctccagggcgagagggcggttaatccgaaaatggccagggctccgtcttcaattgctcagggcttgcacgcgaacccgcgccgtaccgctgctgatcatacccagctgttcggcagccttgcgtgaaagatcgatcaagcgcccacgggtatgcgggccgcgatcattgatgcggacaaccacggatctgtcgttgtcgagattggtgaccttgacctgggtgccgaagggcaggcgccggtgggcagcggtcatggcgttctggttgaagggttcaccgctggcggttttgttgccgtggtgtttggcgccgtaataggaggcggtgccggtttcgtcgtagccgttggggtcgatgaggccgctggcgcagccggccaacagggagaacagggccaggaggccgagtagacgcttcattcaaggtttccccatgtcaaaggtagaatgaacttatgtgggagggggcttgcccccgatagcggcgcatcagccagacattcgtcagctgacactctgcaatcgggggcaagccccctcccacattggtccgagccgagcatgaaacctgactcggacccttcatcgctatcagccttcgagcttgcttttcagcagttcgttcacctgttgcgggttggccttgcctttggaggctttcatcgcctggcccacaaagaagccgaacatcttgccgcgcttggcttcgtctgccgcacggtattgttcgacctgctcggcgttggccgcgagcatttcatccagtacggccgagatcgcgccgctgtcggtgacttgcttgaggccgcgcttctcgatgatctcgtcggcactgccttcgccactggccatggcttcgaacacggtcttggcgattttgccggagatggtgttgtccttgatgcgcagcagcatgccgcccagctgctcggcgctgaccggggcttcgtcgatttccaggccctgcttgttcaacaggctgcccagctcaaccatcacccagttggccgccagcttggcgtcaccggcaatgctcacgactttttcgaagtagtcggcttgctcacggctggacgccaggacgctggcatcgtagaccgacaggccgaactgctcctggaagcgctcgcgtttctgctgcggcagttccggcagggtggcgcggatgtcgttgaggaacgagtcctccagcaccaccggcagcaggtccggatcggggaagtaacggtagtcgttggcttcctctttgctgcgcatggcgcgggtttcgtctttgttcgggtcgtacaggcgggtttgctggatgaccttgccgccgtcttcgatcagctcgatctggcgacgcacttcgctgttgatcgccttttcgatgaagcggaacgagttgacgttcttgatctcgcagcgggtgccgaattcgacctggcctttgggccggatcgacacgttgcagtcgcaacgcagcgagccttcggccatgttgccgtcgcagatgcccaggtagcgcaccagcgcgtggatcgtcttgacgtaggctacggcttccttggcgctgcgcatgtccggctcggagacgatctccagcagcggcgtgccggcacggttcaggtcgataccggtcgcgcccgggaattcttcgtgcaggctcttgccggcgtcttcttccaggtgcgcacgggtcacgccgacgcgcttgatggtgccgtcttccagcgggatgtccaggtggcccttaccgacgatcggcaattccatctggctgatctggtagcccttgggcaggtccgggtagaagtagttcttgcgcgcgaacacgttgtgctggccgatctcggcgtcaatcgccaggccgaacatcaccgccatgcgcaccgcttcctggttcagcaccggcaatacgccgggcatgcccaggtcgaccaggctggcctgggtgttgggctcggagccgaacgtggtggcgctaccggagaaaatcttcgattgggtggcgagctgggtatgaatctccagcccgatcacgacttcccattgcatagtgttctcctcagaagccggtaggggtgcgagtgtgccagtcagtgttcaactggtactggtgcgccacattgagcaggcggccttcctggaaatacggggcaagcaattgcacgccgaccggcaggccatcgacgaagccagcgggcatggacaagcccggcaggcccgcgaggttggcggtgatggtgtacaggtcttcgagatacgcagccaccgggtcgccgttcttggcgccgagtttccaggccgggttcggcgtggttgggccgagaatcacgtcgacctgttcaaaggcggccatgaaatcgtttttcaccaggcggcggattttctgcgccttcaggtagtacgcgtcgtagtaaccggccgacagggcgtaggcgccgaccatgatgcggcgctgcacttcggcgccgaagccttcgccacgggagcgtttgtacaggtcggtgaggtctttcgggttttcgcagcgatagccgaaacgcacgccgtcgaaacgcgacaggttcgaagaggcctctgccggcgcgatcacgtagtacgcagggatcgcgtgctggttgtttggcaggctgatttccttgatcacggcgccgagcttttccagctccttgacgctgttgtgcaccagctcagcgatacgcgggtcgaggccggcgctgaagtattccttcggcacgccgatgcgcaggcccttgagcgaggcgttcaggctggcgctgtagtccggcaccggctcatcgatgctggtggagtcctgtttatcaaaaccggccataccttgtaacaaaatcgcgcagtcttcagcggtgcgggccagggggccgccctgatcgaggctagacgcataggcgatcatgccccagcgggaaacgcgaccgtaggtcggcttcaggccggtgaggttggtgaacgcggcaggctggcggatcgaaccaccggtatcggtggccgtggcggccggcaggaagcgcgcggcaacggcggcagccgagccaccggacgaaccgccgggcacgtgctccaggttccacgggtttttcaccgcgccgtagtagctcgactcgttggccgaacccatggcgaattcgtccatgttggtcttgcccagggtcacggccccggcggcggccagcttggacaccacggtggcgtcgtagggggctttaaagttgtcgagcatcttcgagccgcagctggtgcgaatgccctgggtgcagaacaggtccttgtgggcgataggcgcgcccagcagcaggccattttcaccgttggcgcgacgtgcgtcggcggccttggcctggctcaaggccagctcttcggtgaggctgatgaagctgttgaccttcggatcgtgctcggcgatacgcgccagcagggtcttggtcagctcttcggaagaaaactttttgtcggcgagaccgcgcgcgatctcggccagagtcatgtgatgcattgcaggctctttccctttagtcgatgactttcggaaccaggtacaggccgttttcgaccgctggcgcgatggactggtaggcctcgcgattattactctcggtcacgacgtctgcgcgcaggcgctggctggcttccagcgggtgagccaggggctcgatgccgtcggtattcacggcttgcatttggtcgaccagcccgagaatgctgttcagggcgtcggtggtctgtggaagatcgccttcattgaggcccaggctggccaaatgagcgattttttccacgtcggagcgttcaagcgtcatgggaatctccagtggaaaacagaacggaggctgtccgtgtgttagattgtcggaacactaccgcatttctacggtcttacggccgcgattgtggggttaggtgcacagaaagtcggccaatttagcacattggcgccttgcccaaaatccctgtcgttgttagagtttgccgcacttttttacccacgcgttgcctagggtccctttcccatgttcaagaaactgcgtggcatgttttccagcgatctttccattgacctgggcactgccaacacccttatttacgtgcgcgagcgcggtatcgtcctgaatgagccatcggttgtggccattcggacccatggtaatcagaaaagtgtcgttgccgtcggcaccgaggccaagcgcatgctcggccgtacaccaggcaatattgctgccattcgtccgatgaaagacggcgtgatcgccgacttcagtgtctgcgagaagatgctgcagtacttcatcaacaaggttcacgaaaacagtttcctgcagcccagccctcgtgtgctgatctgtgttccatgcaaatccacccaggttgagcgtcgcgccatccgtgaatcggccctcggtgccggtgctcgtgaagtgttcctgatcgaagagccaatggcggctgcgatcggtgccggcctgccggttgaagaagcgcgcggttcgatggtggtggacatcggtggtggtaccactgaaatcgccctgatttccctgaacggtgtggtgtatgccgaatccgtccgcgtcggcggcgaccgcttcgacgaagcgatcatcacttatgtacgccgtaactacggcagcctgatcggtgaatccaccgccgagcgcatcaagcaggaaatcggcaccgcctacccgggcggcgaagtgcgcgaagtcgatgtgcgcggtcgcaacctggccgaaggcgtgccacgtgccttcaccctgaactccaatgaagtgctggaagctctgcaagagtccctggccaccatcgttcaggccgtgaagagcgccctggagcaatcgccgccggaactggcttccgacatcgccgagcgtggcctggtgctgaccggtggtggcgctttgctgcgcgacctcgacaagctgctggcccaagagactggcctgccggtgatcgtcgccgaagacccgctgacctgcgttgcccgtggcggtggtcgtgcactggaaatgatggataaacacaccatggacctgctttccagcgaataagcctttgctggtgagcccatgtttcgcccgcaggcagcactttgcagtgctgcctgttggcgtttatcttcttcaatctgcatccaggccggttagatgccgtatgaataaagagaacatttgcctgggaggagcggcttattaaaccgcttttcgccaaaggcccctcattgggcgtgcgcctgttggtgctggtcgtgctttcggtcgcgctgatggtggtcgatgcccgctttgcactgctcaagcccgtgcgcagccagatgtcgctggtgttgatgcagacctactggatcaccgacctgccgcaacgtctgttccagggcgtggccagccagttcggcagccgcaccgagttggtcgccgagaacgaaaaactcaagactgagaacctgctgttgcagggacgcatgcagaagctggcggccctgaccgagcagaacgttcggctgcgcgagttgctcaactcttccgcattggtcaatgaaaaggtcgaagtagccgagttgatcggcatggaccccaaccccttcacccatcgcattatcatcaacaagggtgaacgcgacggggtggtcctcggccagccggtgctcgacgcccgtggcctgatgggccaggtggttgaactgatgccctacacctcgcgggtgttgttgctgacggacaccacccacagcatcccggtgcaggtgaaccgcaacggcctgcgtgcgattgccagcggcaccggcaacccggaacgcctggagctgcgccacgtcgccgacacggcggatatcaaggaaggcgacctgttggtcagctccggcctgggccagcgtttcccggcgggttacccggtggcgacggtcaaggaagtgatccacgattccggccagccgttcgctattgtacgtgccgtgccgaccgccgccctgaaccgcagccgctacctgctgctggtattcagcgacaaccgcaccccggaagagcgtgccaacgacgccgcccaggcccaggaagcggaagacaagcgcaacggtacagcgccgatcgttcctgcaacggtgcccaagcctgcattcgtagggccgcccgcacccgccgctaccccggccgcgcccgtggccacaccggtcaagccggccgcccacaacgctcgcccggccaaaccggcggcgactaaaccaccggccgccacgcctgcagccaagcctcctgcggccgctgcggccaccacgcggcagagggaagaataatggccggtactcattcgcgtaacggttggatcgtctggctgacctttgccatcggtttgttgctcagtgtttcgccgctgccgcagttcatggaaatccttcgcccgctctggctggcgttgctgttggccttctgggcgctgaacctgccgcacaaagtcggcatggtcacggcgatgttcctgggcctggcggaagatgtgctctatggcaccttgctgggccagaacgcgttgatcctgacgttgatcactttcctggtgctgtcgttgcagcaacgtttgcgcatgttcccgatgtggcaacagtgcctggtgatcctggtgatcttcggcctggcgcagttggttcagctgtggctcagcgcgttgaccggcaaccgtcaaccgaccctcgcgctggtgctgccggccctggtcagtgcgttgctgtggccatggatcagctttggtctgcgtgggttgcgtcgtcgctataaaatcaattgaatggattgcgaggctctgcctggttatcgagccctacagggagagtctgcaatgaattcgctttacctggcctcgggctctccgaggcggcgtgaactgttgacccagatcggtgtgcccttcaccgtggtcagcgccgctattgatgaaacccctcttacaaatgaatccgccgtttcctacgtggagcgcctggcgcgcggcaaggcagcggcgggttttgctgtgctcccaaatacgtctggcgcctgtgtgctgggggctgatacggctgtgatcgttgacggtcagatcctcggtaagcccgttgaccaggccgacgccttggcgatgttgatggccctggcggggcgtgagcacgaggtactcaccgccattgccctcaccgacggccagcgctgcgagattgtttgtgtaagtagtcgtgtacgttttcgcgacatttctgtcgaggaggctacaacctactggcacagtggcgaaccccaggacaaggcgggcggctatgctatccaaggcctgggctcggtgtttgtggccgggctcaatggcagttattcggcggtagtcggcctgccggtgtgcgaaaccgcacaactgctccatcaattcggcataccctgttggcaaaatcttaccgcgcgctgatcgccgttccccagcgcccagccttaagcgattggtcactattgtgaaaacgcctgaacgagacccagccatgagtgaagagattctgatcaatatcacgccgatggaatcgcgcgtggcggtggtagagaacggtgttctgcaagaagtgcacgttgagcgcacccagaagcgcgggatcgtcggcaatatctacaaaggcaaggtggtgcgcgtattgccggggatgcaagcggcattcgtcgatatcggtctggatcgtgcggcatttatccatgcttcggaaatttccctgcgtgaaggccctgctgtggaaagcatcagcgcgctggtgcatgaagggcagagcctggtggtgcaagtcaccaaggaccccatcggttccaagggcgcgcgcctgaccactcagctatcgataccatcgcgttacctggtgtacatgccgcggaccgcgcatgtcggcatttccttgaagatcgaagacgaagccgagcgcgagcgcctcaagaaggtggtcagcgactgtgtggccgccgaaggcatcaaggaagcaggcgggtttatcctgcgcaccgccgctgaaggcgccggcgccgatgaaatcctcatggacatccgctatctgcggcgtctgtgggatcagatcggtgcccagatcaagaccatcggtgcgcccagcgtcatctatgaagacctgggcctggccttgcgcacactgcgcgacctggtcagcccgaagattgagaaaattcgcatcgactcgcgggaaaccttccagcgcaccacacaatttgttgccgaactgatgccggaaattgccgatcgcctggagcactaccccggcgagcggccgatcttcgacctgtatggcgtcgaagatgaaatccagaaagccctggaacgcaaggtgccgctcaagtccggcggctacctggtggtggacccggcggaagccatgaccaccatcgacgtcaacaccggcgcgttcgtgggccatcgcaacctcgaagaaaccatcttcaagaccaacctcgaagcggcgaccgcgattgctcgccaactgcgcctgcgcaacctgggtggcatcatcatcatcgacttcatcgacatggaagacgaagagcaccagcgccaggtgctgcggaccctcgagaaacagctggagcgtgatcacgccaagaccaacatcatcggcattaccgagttgggcctggtgcagatgacccgcaaacgcacccgcgaaagccttgagcaagtgctgtgcgagccgtgcagcagttgccaggggcgcggtaagttgaagaccccggaaacggtttgctacgagattttccgcgaaatcctgcgcgaggcgcgtgcctaccaggccgaaggttatagagtgctcgccaaccagaaagtggtcgaccggctgctggacgaagagtctggcaacgttgccgaactggaaggctttatcgggcgcacgatacgcttccaggttgaaaccatgtattcccaggaacaatacgacgtggtgctgctctgatccccattcgctttccttttatgagacaggcaggccttgatctgccgttcgactactgccttgagggtcgcctgacatggagcgtctgatacgcttttttgccgctttgacccgttgggggctgggcctctgtgccttgttgctggtgctggcggcggtgtacgtgagcctggggcgtgaattgactccgttggtggccgagtaccgcgccgaagtcgaagccaaggcccaggcagccgtggacatgcctttgcatatcggcagcctcgaaggccgctggagcggctttgcgccggtattgctggcccatgatgtgatggttggcgagggcagcagtgccttgcgcctggaccaggtcgaagtggtgcctgatgtctgggccagtctgatggcccgcgaagtgcgcattgcccacctgcaagtcagtggcctgcaactcagcgtcaaggaagacaaggacggcaagtgggccttgcaaggcctgccggtgcaggacgaccagccgctggacccggagcagttgctcacgcagatgcagaaggtcaagcgcgtgtcgctgctcgacagccaagtgacgctgcaaccgttcgaccaggcgccggtgaccctgacgtatgtcggcctgagcctgcacaccggcgtcacccgccaacgcctggatgcacgcctgaccctgcctgacggccagcccctcgccatgagcctgcgcacccgcattcgcgccagccagtggaaggacggggaagtccaggcttatctgagcctgccccagagtgattgggccaagtggatccccgcaaaactgactcaacagtggaagctcacgcagttcaaggcgggcggtgagttctggctgacctgggccaaaggcactgtgcaaagcgcagtagtgcgcctcaactcgccacaggtgaagggccactacgccgagcgcaagccggtgcatatcgaaaacctcgcgcttacggcctacctgcaacgcagtgacaccggcctcagcgtgctgttcgactcactggcgatgaatctgggcgagacccgctgggaatcacgcctgcagttgcagcagaccctggccaccgacaaggacctggaagtctggaagctccaggccgaccgcctggacctgacgcctatcacaccattgctcaatgcgctggcgccgctgccggaaggttttgccaagacggtcgagcacctcaaggccactggcctgctgcgtaatgtgctggtggacttccgtccccaggacacgaccgataagaaggtcagcttcgccgccaacctcgaacgcatcggcttcgatgcctacttcggcgcaccggctgcgcgtaacgtgtccggcagtatcagcggcgacctgggccagggcgagttgcgcatggacagcaaggacttttccctgcacctcgacccgatcttcgccaagccctggcagtacctccaggccaatgcacgcctgacgtggaagctggacaaagaaggcttcaccctgatcgccccttacatcaaggtgctgggcgaggagggcaagatcgccgccgacttcctgatccgtctgcatttcgaccacaaccaggaagactacatggacctgcgggtcggtatggtcgatggcgacgggcgcttcacccccaaatacctgccggcggtgttgagccccgccctggatgaatggctgcgtaccgcgattctcaagggcgcggtggatcaaggcttcttccagtatcagggttcgttgaaccacgatgcgctgccggcttcacgcaatatcagcctgttcttcaaggtgcatgatgccgagctggcgttccagccgggctggcctcatgtgagcaaggtcaacggcgaagtgtttgtcgaggagagcggtgtgcgcatcctggccagcaagggccagttgctcgataccaaggtcaaggacatctacgtcaatattccccacgcagctgcgggcaaagacagccatctattgctcacgggcggttttgccggtggcttgggtgatggcctgaaaatcctccaggaagcgccgatcggcactgcatcgacttttgccggctggaagggcgagggtgacctgcaaggcagccttgacctggatattccgttggccaagggcaccgaaccaaaaatcgtggtggacttcaaaaccgacaaggcgcgcctgcaattggccgagccgcccctggacctgacccagatcaagggcgagttccgtttcgacagcgccaagggcctcagtggccagaacatcaccgcccaggcgtttgatcggccgatcactgcgcagatcgttgccgatggcaaaccgggcaatatcagcacccgtgtgaatgccaagggccaggtaacggtcaagcggctgacggactggttgaaaatcagccagccgttaccggtgtccggcgatattccttaccagttgcaggtgaccctggatggcgccgacagccaactgatggtcagttccaacctcaagggcgtggccgttgacctgccggcgccattcggcatgccggccagccaggggcgtgacagtgtgttccgcatgaccttgcagggtgccgagcgccggtactggtttgattatggcgagctggccaactttacctttgctgcgccgccggacaaattcaatgacgggcgcggtgagttgttcctcggtgatggcgatgccgtgctgccgggtgccaagggcttgcgcattcgtggggtgttgtcggagctggacatcgatccgtggaagaaactggtggatcgctatgcgggcaatgacccgggcggcagtgccaagcaattgctcagcggcgctgacttcaaggtgggcaagctgaccggttttggcacccagttcgatcaagtcagtttgcaacttgaccgtaagccagcggcgtggggcttgcagctcgacagccagcaggccaagggtacggtcaacctgccggacgccaagggcgcgccgattgcgatcaacctgcagtacgtgaagctgccggcggtggacccgacggtacaggcggatgaaaacgcgccggaccccttggcgaacatcgaccccaaggatattccagcgctggatatcgccatcgaccagttgttccagggcccggacctgatcggcgcctggtcgctgaaaatccgcccgaccgccaagggcctggccttcaacaacctggatctgggcctcaagggtatgcagctcaagggtgcgggtggctgggagggcgcggcgggagacagcagcagctggtacaagggccgcctggatggcaagaatattggcgatgtactcaaggggtgggggtatgcgccgaccgtcaccagccaggatttccatctggatgtggacggacgttggcctggttctccggcctatgtagggcccaagcgtttctccggcagcctggatgcggcgttccgcaacggccagttcgtcgaagtggagggcggagcccaggccctgcgggtattcggcctgctgaacttcaactccatcgggcggcggttgcgtctggacttctccgacttgctcggcaagggtttgagctatgaccgggtcaaaggcctgctggccgccagcaatggcgtgttcgtgacccgggagccgatcaccatgactgggccgtcgagcaacctcgaactcaacggcaccctggacctggtggctgaccgtgtcgatgccaagctgctggtaacgctgccggtgaccaacaacctgccgatcgcggcgttgatcgtaggtgcgccggccattggtggcgcgttgttcctgatcgacaagttgatcggtgaccgtgtttcacgcttcgccagtgtccagtacaaggtcgaaggcccgtggaaagacccgaaaatcaccttcgacaagccatttgaaaagccaaactgagaggctgtggagtagcatggtgccatgccctttatggagtgttggcccatgtcctttgcggtaattcaaatggtcagccagagtgacgtgctggccaacctggcccaggcccgtcgcttgctggaagaagccgcggccggtggtgcgaaactggcagtgttgccggaaaatttcgccgccatgggccgtcgtgacattgccgatatcggccgtgccgaagcgctgggcgaaggcccgatcctgccgtggttgaaacagaccgctcgcgacctcaccttatggatagtggctggtactttgccattgccgcccaagggccaaccgcacgccaagtccaacgcctgctcgctgctaatcgatgatcagggcgaaatcgtcgcccgctacgacaagctgcacctgttcgatgtggatgtcgccgatgctcgtggtcgttatcgcgaatccgacgactatgctttcggaggtaacgtggtggtggcggacacgccggtcggccgtttgggcctcacggtgtgctacgacctgcgcttccccgagctgtacagcgaattgcgtgctgcgggggctgaattgattacagcgccgtcggcgtttacggcagtgaccggcgccgcgcactgggacgtgctgattcgcgcacgggccatcgagacccagtgctacctgctggcggctgcccaggggggtgtgcatccggggccacgggaaacctacggtcacgcggcaattgtcgacccctgggggcgcgtgctgacacaacaggatcaaggcgaagcggtgttgctggccgaacgcgatagcagtgaacaggcgtcgatacgggcgcgcatgccggtggtcaaccatcggcgctttttctcgcagggcgcacagcggcctgcttcggaacgatgaatttaaggccatacctatgagcgagttgttgtcctcagtcagtgatcacctcctggcgcccggtggcgtgaccatcgaaagcttgcaaaccgtgctgggcgatctcgccggtccgggcatcgacgcggccgacctgtatttccagggccagatttccgagtcctgggcactggaagacggcatcgtcaaggaaggcagtttcaacctcgaccagggtgtgggcgtgcgggcgcaatccggtgagaaaaccggttttgcctacagcaacgcgataaccctggaggctttgggcctggccgcacgtgccgcacgctcgatttcccgcgccgggcagaacggcacggtgcaggcgttcagcacgcaggacgtgacccagttgtacgggccggataacccgttggaagtgatgacccgtgccgagaaagtcgacttgctcaagcgtgtcgatgccgcgacccgtgcattggacccgcgtatccagcaggtcaccgtaagcatggccggcgtgtgggagcgcatcctggtggcgtccaccgacggcggcctggcggcggatgtgcggccgctggtgcgtttcaacgtgagtgtgatcgtcgagcagaacggccgtcgcgagcgcggtggccatggtggcggcgggcgtaccgactaccgctatttcctcaccgacgaccgtgccatgggttatgcgcgtgaagcgctgcgccaggcactggtcaacctggaagccattccggcgccggcgggtacattgccggtggtgctgggctcgggctggtccggcgtgctgctgcacgaagcggtcggccacggcctggaaggtgacttcaaccgcaagggcagttcggcctacagcgggcgcatgggggagatggttgcgtccaagctctgcaccatcgtcgatgacggcaccctggccgggcgccgtggttcgctgagcgtcgacgacgaaggcacgccgaccgagtgcaccaccctgatcgaaaacggtgtgctcaagggctacatgcaagacaagctcaacgcccgtctgatgggcgtggcgcgtaccggtaatggccgtcgtgaatcctatgcgcacctgccgatgccacgcatgaccaacacctacatgctgggtggcgaaagcgatccggctgaaatcatcgcctcggtgaagcgcggcatctactgcgccaacctcggtggcggccaggtggatatcaccagcggcaagttcgtgttctccaccagcgaggcgtacctgatcgaagacggcaagatcactgcgccggtcaaaggcgcaaccttgatcggtaacggtccggaagccatgagcaaggtgtcgatggtcggtaacgacctgtcgctggacagcggcgtgggcacatgcgggaaagatgggcagtcggtgccggtgggtgtcggccagccaacgctgaagattgatgcgatcaccgtgggtggcacggggtcgtaagcggtggagcttcgggtggcgaaggccgccacccggggaagggcatcaacgcaggccgcgttgagtctcgtccagctcacggatgtacttgaagattttacggctggtggccggcgccttgttatgcgccagctcgtgctgggcctgacggatcagggagcgcagttgctggcggtccgcatccgggtagtccagcacgaatttctccagcaccgcgtcatcgcccgagatcaggcggtcacgccaacgttccaggttatggaaacgttcgttgtactggcgagtggaggcatcggtttgatcgagcaaagtcagaatggcgtcgatgtcctggtcgcgcatcagcttgccgataaacgagatgtgccgtttgcgcgcgatattcgcggtgtgcttgggcgcatcggccagggctcgacgcatttcgtcggtcaaaggcagttttgcaatcaaatcttttttgagcgttgtaaggcgctcgccgaggtcaaccaacgcatgcagctcgcgtttgacctgggttttgcttttctccccatcgagggagtcgtcgtaagaatcaaccatggtggcagtccgcaaagaaacgccgccatgataaccagtcgggggccgcttgtccggcccggtcgctcgatggccttaaccgaaagcagaatttgagtggagaaaaccatgagtgcagcccaaagcgtcggtccgcaagcgttaccggcactgcaggaacaagtcgagcagatccttgccgaggccaagcgccagggggccagtgcctgtgaggtggcggtgtcgctggagcaggggctgtcgacgtcggtgcgccagcgggaagtggaaactgttgagttcaatcgcgaccagggctttggtatcaccctgtatgtggggcagcgcaaaggttcggccagtacctcggccagtggtccggaagcgattcgcgagacggtcgcggctgcgctggcgattgccaagcatacgtccgaggatgaaagctcgggcctggccgacaaggcgctgatggccaaggacttgaaagactttgatctgttccatgcctgggacatcacaccggaacaggctatcgagcaggcgctgacctgcgaagccgccgcgtttgaagctgatgcccgcatcaagaacgcggatggcaccacgttgagcacgcatcagggctgccgcgtatatggcaacagccatggtttcatcggtggctacgcgtccacgcggcatagccttagctgcgtgatgatcgccgaagcgaatggccagatgcagcgcgattactggtatgacgtgaaccgccagggcgatttgctggccgacccggtcagtattggccagcgcgctgcgcagcgggcggcgagccgcctgggcgcgcgcccggtaccgacctgcgaggtgccggtgttgttttcggcggagttggccggaggcttgttcggcagtttcctgggggcgatttccggcggcaacctgtaccgcaagtcgtcgttccttgaaggcgcgatcggccagaagctgttccccgaatggctgaccatcgacgagcgtccgcacctgatgcgcgccatgggcagttcagcgttcgacggtgatggcctggccacctatgccaagccgtttgtcgagaagggtgagttggtgtcctacgtattgggtacttacgccggtcgtaaattgggcctgccaagcaccgcaaactccggtggcgtgcacaacttgttcgttacccatggtgatgaggaccaggcggcgctgctgcggcgcatggggcgtgggctgctggtgaccgagttgatgggccatggcctgaatatggtgacgggcgactactcccgtggcgcagcggggttctgggtggaaaacggcgagattcagtttgccgttcaagaggtgacgattgccggcaacatgcgcgatatgttcaagcagatcgttgccgtcggaaatgacttggagttgcgtagcaatatccgcacgggttcggtgttgatcgagcggatgaccgtcgccggcagctgatccttcagacgcgcttcaacaagaaggcgcgccatctttatagatggcgcgcctttttttgtggtggcgtttcaggaggattgtcctgccacacttgttttgattctcaatatcatttaataataaatatcattaccgaatgagtgtggatcatgagttctgtcctgcatgaggatccttacctggagagctggcgctggatgagtcgccagattcgttgcggcctcgaccccaacgagccgcgcctgatcgaacactacctcaacgagggccgatacctggcgtgctgcaccgcgacccatccgtggacgatcgctgaaacctcattccgcctgttgctcgacaccgccagcgatatcgcgctgccctggcattggcgttccctgtgcctggaccaggcctggcgcccgctgcgcgacctggaaaaactctcccactgtgcctgccgcctcaagcgctggcagagctttgcctggcaattggcgacctgcgaattgctgccgtctatttctcactccgaccttgttcaaggatctaacgatgagtaacacccgtatcgaacgcgacagcatgggcgagctgcaagtgcctgccgaggccttgtatggcgcacaaacccagcgagcggtgaacaactttccgatcagcaatcaacgcatgccggcgcaattcattcgtgccctgatcctggccaaagctgcggcggccaaggtcaacgtcgacctcaagcaaatcagcgaaagccagggcaaggcgattgtcgatgccgcccagggcttgctggaaggcgacttcatgcagcacttcccggtggacatcttccagactggctccggtaccagctccaacatgaacgccaacgaagtgattgcgacccttgccagccgcttgctgggtgagccggtcaaccccaatgaccacgtgaattgcggccaaagcagcaacgacatcattccgaccactatccacgtcagcgccgcgctggtgctgcatgagcaaacattgcccgcgctgttgcatctggtgcaggtgatcgagcagaaagccgaggaagtccacccgttcatcaagaccggccgcacgcatctgatggacgccatgccggtgcgcatgagccaggtgctcaatggttgggcgcagcagctcaaggccaatatcgggcatttgcaggaccttctgccgagtttgcaagccctggcccagggcggtactgcggtcggcaccggaatcaatgcacacccggaattcgcggtgcgtttcagtcagcagttgagcagcctgaccggtgtgaaattcaccccgggcaagaacctcttcgcgctgattggctcccaggacacggccgtcgctgtctccgggcagttgaaagccaccgccgtgtcgctgatgaaaatcgccaacgacctgcgctggatgaactccggcccactcgccggcctgggggaaatcgagctggaaggcctgcagcctggttcgtcgatcatgcccggcaaggtcaacccggtgatccctgaagccaccgcgatggtggccgcacaagttatcggcaacgacacggtcatcaccgtcgccggccagtcgggcaacttcgaactgaacgtgatgctgccgatcatcgccaataacctgatcagcagcctcgagttaatggccaactccagtcgtttgctggcggacaaggccattgccagcttcaaggtcaatgaggccaagctcaaggaagcgctgtcgcgcaacccgatcctggtcaccgcgctcaacccgatcatcggttaccaaaaggctgctgaaattgccaagaaggcctatcaacagggccgtccggtgattgatgtcgcccttgagcacaccgacttgccgcgcagtcaactggaaatcctgctggatccggaaaagctcacggccggcggcgtgtaatcaccgactctgctttggaggctcaccatggagcactggaaacgcacgatcgaacgggccaatcgctgctttatggcgggtgaattggttgacgctcgcgaggcttacttgcaagccctggccctggcccaagtgctgttcgaacgctgggcggatgccgacgaagcagtggcggcttgcgtcatttcccatcacaacctggcggacctgcacctgcggctgaaccagccggaagaaagcgcggaatacctttgcgctatccaccagcgtcttttgcagaccatgcaggacccgcgcctgagcccgcagttgcgggaggcggcgctgcgccagagcagcaaaacctacgtcgaactgttgaatttcatcagcgatcacggcgaataccctcgcactcatcgcttgctgggcagtactgcagtgcagcccgccacgccccactacggagcccattgatatgacttacaccctgcctgccttgccttacgcgtatgacgccctggaaccgtatatcgatgcgcaaaccatggagattcactacaccaagcaccaccagacctacatcaataacctcaacgcagcggtcgaaggcaccgagttcgcgggctggccggtcgagaaactggtgtccagcgtgcagcaactgccggaaaaactgcgcgcagcggtgatcaatcagggtggcggccatgccaaccattcgttgttctgggcggtgatgtcgcccaagggaggtggcaagcccgaaggcgtgctgggtaaagccatcgacgaacagctgggtggtttcgacagcttcaaggaggctttcaccaaggctgcgttgacgcgcttcggcagcggctgggcctggttgagcgttaccccgcaaaagaccctggtggttgaaagtagtgggaatcaggacagtccgttgatgaacggcaataccccgatcctcggcctggacgtctgggagcacgcctactacctgctgtaccagaaccgtcgcccggaatacatcaacgccttctacagcgtcattaactggccggaagttgctgcccgctatcaggccgcggtggcctgacattcaccttcataacaagacctaaggccgactatgggcactgaaacactggcgatcagcagcggacgaatgtttcgttatgcatttggctcgctgctgctattggcaggtactgcattgctggtggcccacgggctggcctggctgaacctggaaccgcgcatcctgcgcgccctgcaaggcggctccatttgcgcgctgggtacggcgctgggcgcggtcccggtactggtgatccgacgcatgccggtggcgctgagcgatacattactgggttttggcgctggggtgatgctggcggcgacggcattttcgctgatcgtgccgggcattgccgcggctgaaagcctggggctctcgccgtggggtgctagcggcttgatcagctttggcatcatgctgggcgcattcgggttgtacctggttgaccgcaaggtctccggtgccagcccggaaatgctgatggggacgccagacaagccggtgatcccgccgcgcatctggctgtttgtgtttgccatcatcgcccacaacatccccgaaggcatggcggtaggcgtttccgccggtggcggcatgcccgatgctgacagcttggccatgggcattgcgttgcaggacgtacccgaaggcctggtgattgcgttggtgttggccggggcggggatgtcgcgggtcaaggcgttcctgatcggcgctgcatcaggcctggtggagcccgtattcgctgtgctctgcgcctggctggtcagcctggccgaagtgctgttgcctttggggttggccctggctgctggcgcgatgctgttggtggtgacccacgaagtcatccccgagtcgcgacgcaatggtcacgaaaagctcgccagcctgggcctgtgcatcggtttttgcttgatgatggtgatggacaccgctctggggtaggttacgtctactgtaggagcaagcaagctcgctcctacagggggttattcaccttcgtcgaagtaattgttgatcagcgccgccagcgctgccatcgcttcgtcttcctgctcgccttccgtcttcaagtgaatcctggtgcctttgccggccgccaacatcatcatggccatgatgctcttgccgtcgaccatggattccggtgtacgcccggcgcggatctggcaggggaactgccctgctacgcccacgaacttggctgaggcgcgggcgtgcaagcccagcttgttgatgatttcaatttccagagcgggcatcgcgggggtgttcctttcagctaaggtcgcggtggcggacctggacgttcttgagggtttgttgcagcacctggcccaggcgctcggtcaggtagacggagcggtgatggccgccagtgcagccgatggcaatggtgacataggcacggttgcttgcagcaaagcgtggcagccatttgagcaagtaggaggagatatcctggaacatctcctccacatccggttgcgctgccaggtaatcggccacgggctgatccagcccggactggtcacgcagttccggtttccagtacgggttaggcaggcagcgcacatcgaacaccaggtcggcgtcgaccggcatgccgcgtttgaacccaaatgactccacgagaaacgcggtgcccggctctggctggttcagcaggcgcagcttgatagcatcgcgcaactggtaaaggttgaggctggtggtgtttatcttgaggtcggcgaggtcaatgatcggccccagcagcttggtttcgtcttcgatggcttcggccagagagcgatgggggctgcttagggggtgacgccggcgggtctcggagaagcgtttgagcagggtttcttcgtcggcgtccaggtacagcacgtcgcaatgaatgtgcttgccccgcacttcctcgagcaattgcgggaatcgctcaagatggctgggcaggttacgggcatcaatcgaaacggcgaccagcggttgggccagttcggtatggatcaaggcgcgttcagccaactccggcagcaggccggcgggcaggttgtcgatgcaatagaaaccgttgtcctcaagaacgttgagggcggtgcttttacccgagccggagcggccgctgacgatgatcaagcgcatggttactgcccgttctgttcatccaggacaacctggtacaacgcctcattgctgctggcgctgcgcagtttgtcgcgtacttccttgcggtcgagcatgctggcgatctgccggagcagttccaggtgcgcatcggtggcggcttgcgggaccagcagaacgaacagcagatcaaccggggcgccgtcgatggcgtcgaaatcgatgggggcttccaggtgcagcagggcgctgacaggtgtttcgcagcctttgaggcggcagtgaggaatggcgatgccgttgccaaaaccggtggaaccgagtttttcacgggcaatcagcgcatcgaagacatcttgcatctccagatccggcacttcgcgtgcgatcaggttggcaatttgttcgagggctttcttcttgctgccacccggcacgttcacgagggaacggccgggggtcaggatggtttcaagtcggatcatggggggagagttaacgacctgtaccttgcatcaggtgcagattcttttccttatgctttatgagttggcggtccagcttgtcgtagagcgagtcgatcgccgcgtacatgtcttcatgttccgcattggcgacgagcttggcattcggtacgtgcagggtggcctcgattttctgcttgagcttatcgacctccatgatgacctgcacgttggtgatcttgtcaaaatgccctgcaagcttgttcaacttgctttcggtgtactcacgcaggggcttggtcacttccagttggtgtccactgatgttgacttgcatacagcttctccttcgttgccagtgcataaagcggcaggcaaaggcgcctgccactggaacgctgtggcccgcccgtcacatcaaacgcttacgctcgctggaaggcgcgatcccaagggactcgcggtacttggcgacggttcgacgggcgacctgaatgccttgtgcctccagtaaaccagcgatcttactgtcactcaatggctttttctgattttccgccgcaaccagttttttgatgatcgcgcggatcgccgttgacgagcattcgccgccttcggaggtgctgacgtggctggagaaaaagtatttcagttcataaataccccgtggggtatgcatgaatttctgcgtggtcacgcgtgaaatggtcgactcatgcatgcccaccgcttcggcgatgtcatgcagtaccagcggcttcatcgcctcgtcgccgtattccaggaagccgcgctggtgctcgacgatctgggtggcgactttcatcagggtttcgttgcggctttgcaggctcttgatgaaccagcgggcttcctgcaactggttgcgcatgaaggtgttatcggcgctggtgtcggcgcggcggacgaaaccggcgtattgcgggttgacccgcaggcgtggcaccgactcctggttcagctccaccagccaccgctcgttgtccttgcgcacgatcacgtcggggacgacgtattcggcttcgctggactcgatttgcgagccggggcgcgggttaaggctctgtaccagctcgatgacctggcgcaggtcgtcttccttgagcttcatgcggcgcatcaactggctgtagtcgcggctgcccagcaggtcgatgtagtcggtgaccaggcgctgggcctcggcgagccatggggtcttggccggcaactggcgcagttgcagcagcaggcattcgctgagggtgcgcgcgccgataccggatggctcgaactgctggatgcggtgcaggacggcttcgatctcgtccagttcgatatccagttcggggtcgaaggcttcaagaatttcttcaagcgtctcgtctagataaccctgattgttgatgcagtcgatcagggttacggcgatcaggcgatcggtatccgacatcggtgccaggttcagttgccacagcagatggctctgcaggctctcgccggcggaggtgcgggtggtgaagtcccactcgtcatcgtcattgctgggcaggctgctggcgctggtctggtagacatcttcccaggcggtgtcgaccggaagctcgttgggaatgcgttcgttccattcgccttcctcaaggttgtccaccgtgggggcggtttcctggtaggagggttcctgcacgtcggaattgggtttttgctcgatgttatcggccagcgggtctgcattatcgaagtcgtcgccttcttcctggcgttcgagcatcggattggactccagggcctcctggatttcctgttgcaggtccagggtcgacaattggagcaggcggatggcctgttgcagctgcggtgtcatcgtcagctgctggcccattctcaggactagcgatggtttcatggcaggggcttaacaccttattcgccggcgcaatgcgccatccacgacagggcgcgtgagcgccaaacataagcaaattatatgcctgatgtcgggtgctttgcctagagcgcggtaacaataaaaatccggaggttttcattgactcccgcgcaccttggcgaacgccgtgacaccacggtgtttacaggcggaactcgtgacccaggtacacttccttgaccagttcattggccaggatggtagcggaatcaccttcggcaatcagttggccgtcattgacgatataggcggtttcgcagatatcgagcgtctcacggacgttgtggtcggtgatgagcacgccaatgcccttggccttgaggtgatggatgatctgcttgatgtcgccgaccgaaatcgggtcgacgccggcaaacggctcgtccagcaggatgaacttgggggcagtggccagtgcgcgggcgatttccacgcgacgacgctcaccaccggacaggctcatgccgaggttgtcgcggatatggttgatatggaactcctgcaacaggctttccagctccttgcgacggccgtcacggtcgagttccttgcgggtctcgaggatcgccatgatgttgtccgacaccgacagtttgcggaagatcgacgcttcctgcgggagatagccgataccggcccgtgcgcggccgtgcattggctggtgactcacgtccaggtcatcgatcaggacacggccctgatccgcctggaccagaccgacgatcatgtagaagcaagtggtcttgccggcgccgttggggccgagcaagccgacgatctggccgctgtcgatcgacaggctgacgtcgcgcacgacctgacggcttttataggccttggccagatgctgggctttcagggttgccattactcggccttcttcttcggctggataaccatgtcgatgcgtggacgaggcgcggtgaccttgttgccattggcacgaccggcattagcgatctgtttcacggtgtcataggtgatcttctcaccttccgtggagttgccatcggggctgagcaccttggcctggtcaatcagtacgatgcggttctgctgggcgtggtactggatggtcttgccgtagcccttcatcgggccggtgtcggtcgcggactgcttctgttcgaagtaagccaggttgcccaccgaggtcacgacatcgatgtcgccggttttggtgcgcgttagcgtcacggtattgccggtgattttcatcgagccctgagtgatgatcacgccaccggtgtaggttgcgacgccttgcttgtcatcgagctgtgcatcatcggccgagatgtggatcggctgctggctatcgttcggcagagcccaggcgctcacgcttcccagtgctgcgcccaggccgagcaaaatagggagagttttaacgagcctcatactgtcctcttacgttcgatagcaggtgtatcctgctttctttcaaatacgctttcattcccttgccagtcgatacaccgccagcgccgtcgattctaacgtcttgctcggtctgcgcatattgcttctgcgggaatacggtcatgcgactgctggtaatcaccgtctcacggcttttatcgtcagtgcgcgcaatgcgcaccgagtcgatcagttccacctcggtaccgtccgggttgacctcgccacgcttgctggtgacgtgccatgggaactcggtaccgcggtaaatgttcatgtccgggttggtcagcagggtgacctcggtggccttcacatgctcgaccttgtccgaggtcatttcgtactgcaccttgccgtcaggcaggaactgcacacttttggcattgatggcgtaatagtcgatagcgccttcgtcaacctgcgcagcaggctggtcgagaaagcgctccgggctgatattccagtagcccaccgcgaggaacagcgcggcgatgaccccgaataacaggaagttgcgaatctttttgctcagcataaaacgctctataagtaggcggcgtgtgccgcttcaaggctgccctgggcacgcaggatcagctcgcagaactcgcgggcggcaccttcgccaccgcgggcgctggtgatgccgtgggcgtgttcgcgaacaaacgccgccgcattggcgacggccatgcccaggcctactcggcgaatcaccggcaggtctggcaagtcatcacccaagtaggcgacctgctcatagcttaggttgagttggccaagaagctcgtccagaaccaccagtttatcctcgcggccctgatacaggtgaggaatccccaggttttgtgcgcgacgttccacaacgggcgtttttcggccgctgataattgccgtttgcacacccgccgccatcagcattttgatgccctggccgtccagcgtgttgaatgtcttgaattcgctgccgtcttcgaggaagtacaggcggccgtcggtcagcacgccgtcaacgtcgaaaatcgcgagtttgatatttttgccgcgttgcaacaggtcgctggtcatctacatcactcctgcacgcagcaagtcgtgcatgttcagggcgccaatcgggcggtcgtcgccatcaaccaccaccagcgcgccgatcttgtggtcttccatgatcttcaaggcttcggctgccagcatctctgggcgtgcggtcttgccgtggggtgtcattaccgcgtcgatggtggcggtgtggatatcaatcgtgcggtccagggtgcggcgcaggtcgccgtcggtgaagaccccggccaagcggccatcggcctccaggatcaccgtcatgcccaggcccttgcgggtcatttccatcagcgcatccttcagcaaggtgccgcgctggacatggggcaactcctcgccggagtgcatgacgttttccactttcagcagcaggcggcgacccagggcgccacccggatgggaaaacgcgaagtcctcagcggtaaacccgcgggcttccagcagcgctacggacaaggcatcgcccatgaccagcgcggccgtggtggaggaggtcggtgccaggttcagcgggcaggcctcgtggtccacgtggacgttcaggttgacttcggcggccttggccagcgtcgactccgggttgccggtgatgctgatcatctggatgcccaggcgtttgatcagcggcagcagggtaacgatttcgttggtagtgccggagttggacagcgcaaggatgatgtcatccttggtgatcatgcccatgtcgccgtggctggcttcggccgggtgcacgaaaaacgcggtggttccggtactggccagggtggcggcgatcttgttgccgacgtggcccgacttgcccatgccgaccaccacaacgcggcccttgctggccagaatcatctcgcaggcgcgtacgaaatccgcgtcaatatgggccagcaagccttctacggcttcaagctcgaggcggatggtgcgttgtgcggattgaataaggtcgctggattggctcatgtctgaaatcgtatagcctgacgaaaagtcggcgattatagcggtaatgatcaattccctcacgcaagttcgtcagggtttgttcgcaatgtgcctgagattcaaccccagcaacgatttttccctgtccccaatctgaacaagcactgttccggccttgggcgccttgtaccagcagtgatatagttcgccgccagttcggtccgcccagcccacgtggccaactattgcgcaacggttgcaaacgtttgtcgcaagcgtggtgtctgagtgagaggctgcatcccaaggagtttagatgagtgccgataacgcctacgcggtcgagctgaagggactgaccttcaagcgcgggacgcgcagcatcttcaataacgtcgatatccgcattccgcgcggcaaggtcacgggcatcatggggccttccggttgcggcaagaccacgctgctgcgcctgatgggcatgcaattgcgccccagtgcgggagaggtgtgggtcaacggccagaacctgccgacgctgtcgcgcagcgatctgttcgatgcacgcaagcacatgggtgtgctgttccagagcggtgcgctgttcaccgatcttgatgttttcgagaacgtggcctttccgctgcgggtgcatacccagctgtccgacgagatgattcgtgacattgtgttgctgaaactgcaggccgtaggccttcgcggcgccatcgacctgatgcccgatgaattgtctggtggcatgaagcgccgtgtggcgctggcgcgtgccattgccctcgacccgcagattctcatgtacgacgagccctttgtcggccaggaccccatcgccatgggcgtgctggtgcgtctgatccgcctgctcaacgatgcactgggcattaccagcatcgtggtctcccacgatcttgcagaaaccgcgagcattgccgattacctctatgtagtgggcgatggtcaggtgctggggcagggcacgcccgaagagctgatgaacgccgacaacccgcgcattcgccaattcatgaccggcgatcctgatggcccggtgccttttcactttccggcagcggattaccgctcagatcttctggggaagcgctgatgcgcaagacatctcttatcgagaaggttcgccttttcggtcgctcgggcatcgacatcgtcgaagtgctgggtcgttcgacgattttcctgttccacgccttgctcggccgcggcggtattggcggcgggttcggcctgctggtcaagcagctgcattcggtgggcgtgatgtccctggtgatcatcgtggtctccggggtgttcatcggcatggtgctggcgttgcagggcttcaatattttgtccagctacggttcggagcaggcagtggggcagatggtcgccctgacgctgttgcgtgaactggggccggtggtgaccgccttgctgttcgccgggcgcgcgggttccgcgttgaccgccgaaatcggcaacatgaagtccaccgagcagctgtccagtctggaaatgatcggcgtggacccgctcaagtacattgttgccccgcgcctgtgggccggcttcatttccctaccactgctggcgatgatcttcagcgtggtcgggatctggggcggttcgtgggtggcggtggactggctgggcgtctacgacggctcctactgggccaacatgcaaaacagcgtgaccttcagcggtgacgtgctcaacggcatcataaagagcatcgtcttcgcctttgtggtgacctggatcgccgtattccaaggctacgactgtgagcccacttcagaagggatcagtcgcgccaccaccaagaccgttgtgtacgcctcgctggcggtactgggccttgacttcattttgaccgccttgatgtttggagatttctgatgcaaaaccgcactgtggaaatcggtgtcggccttttcttgctggctggcatcctggctttactcttgttggccctgcgcgtcagcggcctgtcggccagccccaccgccgacacttataaactttacgcgtacttcgacaatatcgccggtttgactgtcagagctaaagtgaccatggccggtgtgaccatcggcaaggtcacggcaatcgatctggatcgcgacagcttcaccggccgagtgacgatgcagctggacaagaaggtagataatctgccgactgactcaactgcatctatcctcactgcgggtctgctgggcgagaaatacatcggtgtcagcgtgggtggggaaacagccctgctcaaggatggctcgacaatccacgacacacagtcgtcgctggtacttgaggacctgatcggtaaattcctgcttaatacggtcaataaagacgccaaatgaggaatctgttcatgatctctaccttgcgacgtggcctgctggtgctgttggcagcgctgccgctgatggctaacgcggcaggttctgcgcacgatctggtgcaggacacgaccagcaaaatgctggctgacctgactgccaataaagagcagtacaagcaagatccgagtaagttttacaacgcgctcaacaccattgtcggcccggtggtcgatgctgaaggcatttcccgcagcatcatgacggtcaagtattcgcgcaaggcgacccctgcgcagatgcagaccttccaggaaaacttcaagaaaggcctgttccagttctacggtaacgcgctgctcgagtacaacaaccagggcattaccgttgcgcctgccggtgatgagtcgggtgatcgcaccagcgtcaacatgagcgtcaagggtaacaacggtgccgtctaccctgtgcagtacacgctggagaaggtcaacggtgagtggaagctgcgcaacgtgatcatcaacggcatcaacatcggcaagctgttccgtgaccagttcgctgatgcgatgcagcgtaatggcaacgacttggacaaaaccatcaacggttgggccggtgaagtcgcaaaagccaaggaaacatccgataaagaagccgggaagtctgcgcaatgaccgagtcggctgttcgtcttggcgacgccggtgagttgttcctcagcggcgtgctggattaccgcacagggcctgagctgcgcaagcagggtcaggcgctgatcaaaactagcactgcgcccgcgctggtgctggattgttcggccgtgaccaagtccagcagcgtcggcttgtcgctgctgctgtgcttcatgcgtgacgccgaagcggcaaaaaaaacggtcagcattcgggcattgcccgaagacatgagtgaaatcgccgaagtttccggtctgaccgagctgctggcgcatccttaataaacattattaaagaagccccccgtcagagtcctgctatgcggggttcgcaggcgcggggcttttttgtatgatgtgcgacccgcgcgcactgggcgccgatagaggttgagcatgcaggccctagaagttaagagctttcttgaaggaaagctgccggaaacgaccgttgaagttgaaggcgaaggctgcaacttccagctgaacgtgattagcgatgaactggcggcactcagcccggtcaagcgtcagcagcagatctatgcccatttgaacccgtggatcaccgatggcagcatccatgcggtcactatgaaatttttcagccgcgcggcctgggccgagcgcacctgagcccccaaggcgtcgagattcttatggataaattgattattaccggcggtgcccgccttgatggcgagattcgcatctccggtgcaaaaaactccgccttgccgatcctggcagcgaccctgctgtgcgatggcccggttaccgtagccaacctgccgcacctgcacgacatcaccaccatgatcgagctgttcggtcgcatgggcatcgagccggtgatcgacgagaaactggccgtcgaaatcgacccgcgcaccatcaagaccctgatcgccccgtacgaactggtgaaaaccatgcgtgcgtcgatcctggtgctcggcccgatggttgcccgtttcggcgaagccgaagttgccctgcctggcggttgcgccatcggctcgcgtccggttgacctgcacatccgtggcctcgaagccatgggcgccgttatcgacgttgaaggcggctacatcaaggccaaggcgccggaaggcggcctgcgtggtgccaacttcttctttgataccgtcagtgtgaccggtaccgagaacatcatgatggccgctgccctggccaaaggccgcagcgtcctgcaaaacgccgcgcgcgagccggaagtggtcgacctggccaacttcctgaacgccatgggcgctaaggtttccggtgccggcaccgacaccatcaccatcgatggcgtagagcgtctgcataccgccacctacaaggtcatgcctgaccgcatcgagaccggcacctacctggttgccgctgccgtcaccggtggccgcgtcaaggtcaaggacaccgatccgaccatcctggaagcggtcctggaaaaactgcgcgaagccggtgcagaaatcaccaccggtgaagactggatcgagttgaacatgcacggcaagcgtcccaaggccgtcaacgtgcgtaccgctccgtacccggcgttcccgaccgatatgcaagcgcagttcatctccctgaacgcgattgccgaaggcaccggtgccgtgatcgagaccatcttcgaaaaccgcttcatgcacgtgtacgaactgcaccgcatgggcgcgaagatccaggttgaaggcaacaccgccatcgtcaccggcactgagaagctcaagggcgcgccagtcatggccaccgacctgcgggcttcggccagcctggtgatctcggcgctgatcgccgaaggcgacaccctgatcgaccgcatctaccacatagaccgtggttacgagtgcatcgaagaaaaactgcagatgctcggcgcgaaaatccgccgcgtaccaggctagttgccgtttgtagtgagcgggcttgccccgcgctggactgcgcagcagtcccttttttggggtcgctacgcaacccagcgcggggcaagcccgctcaccacaagaaggtgcctgccgttgaataagcagcatgctgaacttgtttcaaatcgaggctgtaatggcctcgatctgtgtccggcgccgtttgcgaccggaccgcaatagcctgatgaaggactgacgtttcccatgttgaccatcgcactgtccaagggccgcatccttgacgacacgttgccgcttctggctgaagcgggcatcgtgccgaccgagaatccggacaagagccgcaagctgatcatccccacgacccaggacgacgtgcgcctgttgatcgtgcgggctaccgacgtgcctacctacgttgaacatggcgcggccgacctcggcgtcgccggtaaagacgtgctgatggaatacggtggccagggcctgtacgagccgttggacctgcgtatcgccctgtgcaagttgatgaccgccggccgtgtcggtgatgtcgagcctaaaggccgtctgcgcgttgcgaccaagttcgtcaacgtcgccaagcgttactacgccgagcaaggccgccaggtcgacatcatcaagctctacggctcgatggagctggcgccgctgatcggcctggctgacaagatcatcgacgtggtcgacaccggcaacaccctgcgcgccaacggtcttgagccgcaagaattcattgcagacatcagctcccgcctgatcgtcaacaaggcatcgatgaagatgcagcacgcccgtatccaggcgttgatcgacaccctgcgcaaggcagtggagtcgcgacaccgcggttgacttacccgcgcggcctcaggtcgcgcccgtctatccgcctcatagccagaattctcaggtgcccaagcggatcgactgctaactttcggcgcctgagcatttttgccaatcctatgaggccctcgctatgaccacgtccactgcaattgcccgactcaacgctgccgacccggatttcgcccatcatctggatcatctgctgagctgggaaagcgtgtccgacgattcggtcaaccagcgggtgctcgacatcatcaaggccgtgcgtgagcgcggtgacgcggcgctggtggacttcacccgtcagttcgatgggctggacgtcaagtccatggctgacctgatcctgccccgtgaacgcctggaactggccctgacgcgcatcaccgcgccgcaacgcgaagccctggaagtggcggccgcgcgtgtgcgcagctaccacgaaaaacagaagcaggactcctggagctacaccgaggccgacggcaccgtgctggggcagaaggtcacgccgctggaccgcgccggtttgtacgtgccgggcggcaaggcttcgtacccttcgtccgtgctgatgaacgcgattccggccaaagtggcgggcgtgaccgaggtggtcatggtggtgccgacgccgcgtggtgaaatcaacgagctggtgctggccgctgcctgtattgccggagtcgaccgcgtgttcaccatcggtggtgcccaagccgttgccgcgctggcctatggcactgaaagcgtaccgaaggtcgacaaagtggtcggccccggcaacatctacgtcgccactgccaagcgccatgtattcggccaggtcggtatcgacatgatcgccggcccttcggaaatcctcgtggtgtgcgacggccagaccgacccggactggatcgccatggacctgttctcccaggccgagcacgacgaagacgcccaggcgatcctggtcagcccggacgctgagttcctcgataaagtcgctgccagtatcaataagctgctgccgaccatggagcgcgccgaaatcatcgaaaaatcgatcaatggccgtggtgcgttgatcctggtgcgcgacatggagcaagccatcgaggtggccaaccgcatcgcgccggagcacctggagttgtccgtggccgacccacaagcctggctgccgtcgatccgtcacgccggtgcgatcttcatggggcgccacaccagcgaagccctgggcgactactgcgcaggcccgaaccacgtgctgccgacttccggtactgcgcgtttctcgtcgccgctgggggtgtatgacttccagaagcgctcgtcgatcattttctgctcgccgcagggcgcttccgagctgggcaagactgcctcggtgctggcccgtggtgaatccctgagcgcgcatgcccgcagcgccgaataccgtatccttgaagagaaggggaactgagacatgagcaaattctggagccctttcgtcaaggacctcgtgccttacgtgcccggcgagcagccaaagctgaccaaactggtcaagctcaacactaacgaaaacccctacggcccatcgcccaaagccttggcggcgatgcaggccgagttgaacgacaatctacgtttgtacccggaccccaacagcgacctgctcaagcaggctgtggccaagtactacggaatcgacgctggcaaagtgttcctcggcaacggttccgacgaagtgctggcgcacatcttccacggtttgttccagcacgacctgccgctgctgttcccggacatcagctacagcttctacccggtgtactgcggcctttatggcatcaaatccgacccgctgccgctggatgaccagttccagattcgtgtggcggactacgccaagcccaacggcgggatcatctttcccaacccgaacgcgccgaccggttgcgtactggcgctggacgcggtggagcagattctcaaggccagcccggattcggtggtggtggtcgatgaagcctatatcgacttcggcggtgaaaccgcgatcagcctggtggatcgctacccgaacctgctggtgacccagaccctgtccaaatcgcgctcactggccggtttgcgggtgggcttggccgtgggccacccggacctgatcgaggcgctggagcgggtcaagaacagcttcaactcctacccactggaccgcctggcgattgttggcgcggcggcggcgttcgaggaccgtgagtatttcgagaagacttgccggttggtgatcgacagtcgcgacaagctggttgcgcaactggaagagaaaggctttgaagtgctgccgtcggctgccaacttcatttttacccgtcacccacggcacgacgccgctggcctggcggccaagttgcgtgagcaaggggtgatcgtgcggcacttcaaacaggagcggattgcccagttcctgcggatcagcatcggcacgccggagcagaaccaggcgttgatcgatgggctgggccagctctaacaagcgctgaaatcaaatgtgggagggggcttgcccccgattgcggtgtatcagccagctaatgcgttgactgacacactgctatcgggggcaagccccctcccacattgggttctacggtgtgggttagatcaacggctcgtcagacttcttgttcttccagccatcattgcccggcagcagcaggttcaacccaatcgctaccaccgcacacagggcgatacccttgaggccgaagtcatccgggccggtgccggtaccgaccagcacaccgccaatcccgaacaccaacgtcaccgacacaatcaccaggttgcgcgcttcgcccaggtcgatcttgtggcggatcagggtgttcatccccaccgcggcaatcgagccgaacagcaggcacagaatcccgcccatcaccggcaccggaatgctctgcagcaacgcgccgaacttgccgatgaacgccaggctgatggcaaacaccgctgcccaggtcatgatcttcgggttgtagttcttggtcagcatcaccgcgccggtcacttcggcgtaggtggtgttgggtgggcccccgaacaggccggcagccgtggtggcaataccatcacccagcagggtgcggtgcaggccgggcttcttcaagtagtcgcgaccggtcacgctgcccaccgcaattacaccgccgatatgttcgatcgccggggccagggccaccgggacgatgaacaggatcgcctgccagttgaattccggcgcggtgaagtggggcagggcgaaccagggggctgccgcaatcttcgccgtgtcgaccacgccaaagtagaacgacatggcaaaacccactagcacgccggagataatcggcaccaggcggaaaatgcccttgccgaacaccgccacgatcaaggtggtcagcagcgccggcatcgagatcatcatcgcggtctggtaatggatcagctcagcgccatcaccggctttacccatcgccatgttcgcggcaatcggcgccatggccaggccgatggagataatcaccggcccgatcaccacgggtggcagcaaccggtcgataaacccggtgcctttgatcttcaccgccaggcccaggaaggtgtacacgaaacccgccgccatcaccccgcccatggtcgccgcgaggccgaactggcctttggcgagaatgatcggggtaatgaaggcaaagctcgacgccaggaataccggcacctgccgccctgtcaccacctggaacagcaacgtgcccaggcccgcggtgaacagtgcgacgtttggatcaagacctgtgatcagcggcatcaacaccagcgcgccaaatgctacgaagagcatttgtgcgccagacaggatctggcgccaaagcgggtcgttgaattcatcctgcatgctcacgcgtccttctgcttggtgccaaagatcttgtcaccggcatcgcccaggcctgggatgatgtagccgtgttcgttgaggcgctcgtcgatggaggcggtgtagatctgcacatccgggtgagccttctcgacggcagcgatgccttcgggtgcagccaccagcaccatggcgcggatatccttgcagccagcttttttcagcaggtcgatggtggcaaccatggaactgccggtggcgagcatcgggtcgatgatcatcgccaggcgctcgttgatttccgggacgagtttttccaggtaagtgtgggcctgcaaggtttcttcgttgcgggccacgcctacggcgctgaccttggcgcccgggatcaggctgagcacgccttcgagcatgccgataccggcgcgcaggatcggcaccacggtgattttcttaccggcgattttctcgacctgcacgggaccggcccaaccagggatttcatagctctccaagggtaaatccttggtcgcttcgtaagtgagcaacgctccgacttcctgagcaagctcacggaagttcttcgtgctaatgtcggcgcggcgcataaggccgagcttgtgtcggatcagcgggtggcggatctcgcgagtgggcatgggaaaggctccggcggcgggcaaaaaaaccggcctagattaatctatccgagggtgttgtcctatagacatctagtacgttagtccattaaggcttgctcggagcgcacgagaagcgtaccttcgcccgcttttcttgccacagcacccccttggagagcgccatgtccgctgatctcgagcatatccgtcaaatcatgcgcgaggctgactgcctgtacaccgaagcgcaagtcgaagaagcgatcgccaaggtcggcgcacacatcacccgcgaaatggccgacaccaacccggtggtcttctgcgtgatgaacggtggcctgattttcgccggaaaattgctgacccacctgcaattcccgctggaagcctcctacctgcacgccacccgctatcgcaacgaaaccagcggcggcgacctgttctggaaagccaagccggaagtctcgttcatcgaccgcgacgtgctgatcatcgatgacatcctggacgaaggtcacaccctgggtgcgatcatcgacttctgcaaacacgccggcgcgcgcaaagtgcacaccgccgtgctgatcgacaaagatcacgaccgcaaggctcgcccggacctgaaagccgattacgtcggcctgccgtgcattgaccgctatatcttcggttacggcatggactacaaaggctactggcgcaacgccaatgggatcttcgccgtcaaagggatgtaagtcatggcccgttttcttgatcagacgctgtttgccgaactggccgagaaagcggccgccagcccccgtggccggcaccaccataacttccaccagatggaagagccttgtcatcgcctggcggtgggcctgcaacctgacacctatgtgccgccgcatcggcacctgagtgcggacaaggcagaaaccttgctggtgctgcagggccgcttgggcttgctggtcttcagcgaaaccggtgaggtcattgccaagcgtgtcatgcaggccggcggtgaatgcgctggtgtggatctgccacccggtgtcttccatggcctggtggtgttggagcccgacacggtgatgttcgagtgcaaggccgggccttatcgtccggtgggcgagggcgaacaggccgattgggcaccccgcgaaggcgaggccggtgtggccgagtaccaacgctggatgcttgcccagttcgattgagctacagtgctgggcccaccttgccggagcggcccatgagcctgttgatacgcacctgcgccgccctggcgctgaccctcagtttgcccctggctgccgcgcctgcgccgatgcacagccaattcctgccttcggacgacctgactctgcgcgctgaagcgccggaccagcagcaattgctgcaagtcaccgagtacgcggtggtggtgggcaaccagcgccagtccagccaacaacccatcccggtgactgcgccgttgatgattcgcctgaagggcaagtccctgaacaaaggcgcgaccatcgcccaggtggtgctcaatttcgacgctgaaagcaaaagcctgaaaaagccggcctacgatgacaagagcaagactttgaccttgtcctacccggtggcccaataccgtgtgattgttgacctgttgcgcaatgacacggtgtatgtgcagttcctcagttatgccaatgggcatatctgggcggatttgcacactggtgcggtgcgtacccaatagcaagaacactgaaaagccaacgtgggaaggagcttgctcctgattacggtggggcggtcaattagatgtcgcctgacactccgccatcgggggcaagccccctcccgcattgaatctccagcgctttcgaagcctgcgtcgcacaggtagacttcaaaccccgtgtaaatgtctgcaggctggagtcggtaatgcgtaaagataagaaacaggtgattggtgacgagatcggcgacgatcagatcaagttgttcctggacttcgagccggtcgacgcgacttccccgtccctgcacaaactgatcaaggcctaccgtggcctgcgtatcgacgatttcgagcggttcctgggcttcttcaaggaagccggcctggacctcgacggcaaggatgagcatggccagaccttcgtcgacctgatcaaggaccagcgcaacgcggacgagtacatcgaactgatcgaaaacgctcgcggctgattatccaagccacaaaaaaacgccccgttctcaggttgagagcggggcgtttttcatggcgcctcaagcgtagctttcggtctcggcggcaggttcaaccagttccaggctgatgttgttctgcgcgttgatcttgcgatacaactcggcatccgtttccaggaccttttcacgggccgggaagatctcgtgcagtttggcagcccactcaccggcggctttttccgggaagcacttctcgatcagttccagcatgatcgaaacggtcaccgaagcacccggggacgcgcccagcagcgccgcgagcgtgccgtctttggccgcgaccagctcggtgccgaattgcagcaccccgccttttttcgggtctttcttgatgatctgcacccgttggccagccacttccaggcgccagtcttcggctttcgcctcagggtagaagcggcgtagggattccaggcgctgttccatggactgcatcacttcgctgaccaggtacttggtcaggtccatgttgtcgcgggccacggccagcatcgggccgatgttgccggcgcgaaccgacagcggcaggtcgaggaacgagccgtgcttgaggaacttggtggtgaagccggcgtatggcccgaacagcagggatttcttgccatcgaccacacgggtgtccaaatgcggcacggacatcggtggcgaacccacggcggcctggctgtagaccttggcctggtggtgcttgaccacttccgggttgtcgcaacgcagccactggccgctgaccgggaagccgccaaagcctttgctttcttcgatgcccgaggcttgcagcagcggcagtgccgcgccgccggcgccgaggaacacgaacttggcatcgacttcacggctgttgccgctgttgacgtccttgatgctcacggtccagcccgcgacgttgcgcttgaggccggtgacgcgtttgctgtacttgacctgggcgtctgccgagctggtcaggtggctgagcagttggttggtcagggcgccgaagttcacgtccgtgccgttcatcacacgggtcgccgcgattttttcgtcgagcggacggcccggcatcatcagcggcatccattcggccatctcactgcggtcttcggtgtagtgcatgtccgagaacgcatggtgctggctgaggctttcaaagcgcttcttgaggaaggacacgcctttttcgccctgcacgaagctcaggtgcggcaccgggctgataaaggacttggacgagccaaaggtgccctttttggtcaggtacgcccagaactgcttcgacacctcgaactgggtgttgatgtgcacggctttcttgatgtcgatggagccatcggcggcctgcggcgtgtagttcagctcacacagcccggcgtggccggtaccggcgttgttccacgggttggaactttccgcggcacccgaatccatcagctcaacgacttccagcttcaggccggggtcgagctctttgagcagtacggccagggtggcactcatgatgccggcccctaccagtactacgtcgactgcttcgttatgcgccatttaacgcgtctccaaaatctgctgcaccaaattgacggcatggctgccaggagtgacggggcggttcacgtgttgccccaggttacccatggccaggatcgccatgtccgattcgcaattctttgcatgttcagcgcacgcttcctgccgggctaatctacctatgaacgcattcatgggcgcctgtggcaattcgacttatggtcaaagcgtgcgattcgtgcaaccaatccgtagcggacaggctcaagctccggtttttaaggcgtgctcggtcctgtgtggttgggctgttccagacgctgatggtgcttgtacaaacgccaaactattcatttgctcgccacactcttgtgaagttgtgaaaacccgttttttcacgctcttttgaagacgtgaacctcaaaaaagggctgccccagcctggcacctggcccctagccgacacgcggcaaaacgggcaaacaactcaagtggccgagcgcaatggcagctctggcagattcggtaaaggcgggtggtttgcaaagaaaacagcaagcgcgccagcttcactcgatctgtgtgggcggctctctgtgggcgattcttggggctaatgccgaggcattaacgatgctgcgaggcccgatcaggagacgtccttataatcggggggagattgtagcgaagaacgccagggaaatgggcgtgttttatgacttttattagccgttcggtcaggcggccaacggttggtgatgcgacggctgcgctgcacgtgggctgacacgggcgctggctggcagcgggtggtgcatccagctcaggcggatttcatcgatttccacccagccgtcgcctacaggaggctggcagcactctttgaaggcctggcaacggccttgcacatcgagcagggcgaactggcgaaggaccggtttgcgcgtgaacagtgaccagagaaattgcatggcgacagacctcttgagattgaggccaagcttgcctgtcgggcatgacgggcctgtgtatcagccgtgacatatcagtgacatcgaaccgctacagtctgtgcaggtctcaggttgtaactggcgctagttcccggcactggcgcaccgctatactgcccgcctgtcggtacccgatttctggagagaagagcatgttgcaacgcctgttgttcggtttgatcactgtgaccagtttgaccctggttggctgcgccaacagcccgcaacaactgaccccggaaccaaaaatcaccacgcagttggcccccgtgggtcacggtcagccagtgtcggtgcgtgtggtggatggtcgtccgtcgcctacgctcggttcgcgcggcggcctgtatccggaaaccgccctggtctcggtgaatgcgcaagacgtgctgcccaagctgcaggcccaggccgaagcagccgtgcgcctgttgggtttcaccccgagcgccaacgcgccgggcgctccgcagttgacgatcaccctggccgaattgaagtaccagtcgcctaaagacggcctgtacgtgaccgaagcgtccatcggcgcgacgttcaagtccgacgtcaccgccggcacccgtcgctacagcggccgctacggtgcgtccctgaaccagcgtttcggtatgtcgccgaaccaggaaaccaacaccaagctggtcagcgacgtcctgagcgacgccttgacccgtctgttcaaggacccaagcatcggttcgctgctcagctcgcaataaccgattctgtaaaaaaaaccgggctcatcattgagcccggttttttttcgtcttcagtttcatgcggccgtgtcgatacagaaatccagcaggctcaccccggtcaacagatcggcctccggcaggtcggcatgctggtgtccgccgagggcgcaatacaccagccagtggcggtcctggacgttgaaggccaggccgccgatcagcgcttcctgctcatcgctctgggcgatcagatacagccgatcctggttttgtgcatgcagcatgacaagctcctaaagcgtcgaagggcaacagagtggcttgttaaggtgacgttcaggtgacgttgtaaattactggatacattagccgtcaatgggggagggagcatttcaggcgccggaggccactatcgttcaggtttgtatctgaaccgataccaaaacactgttttgccgaggtttttgatggcgctgcccgcactgttgaccaatgttgttgctttggccgtggcctgtccgggcgcggcgctgctgttcattacccgtctgcgcgaacagcgcgccatggctgacctgaccgcgcagagcgaagatcgcgcaattgatcagccgatgttgtttctggatgtgcgcaccgaacgggcgcatcgtctggcttaccgcgtcggtttcgcctgcctggggttggcgctggccatttcctggctcagcacccgcctttaagaacaccacaaaacaaatgtgggaggggggcttgcccccgatgacggagcttcagtcgacagctgattgactgatacaccgctatcgggggcaagccccctcccacatttttgaatcggtgtttagaggggtattccagccttgacccgatactgattacgcaccggcgtcgcatattgcaccaccaggaacggccggtgctcagccgggcattcgttcaaacgccgctcccactccgccttcgccttggccagttcatcggccgggaatacttcggccgccgtcggcacctgcaattgcgggtcggcgtcgctccactgggcgtaggccaggtaatgcaccgggaacaaccggtagccccccagaatctgccggtccatttctgcggccagcaacttggtgtcttcgaaacgctcggtaatcggcggcgcgaagttaatgtgcacgcgtcccttgtagccggtgatgcccagggcaatgctcacatcgtcttcgccctgcgccttgacgtaggtgccggtggtagcacggatgtacagctcgcgggccttggctgaatcacatgggtcgtattcgtagctgatggacaccggcgtcaggttcagcgactggatcacctcggcaaacggctcgtccttgcggctgacatggaacatcttgaggatcgccgactcggtacggtcatctccatccttggcgcgcccttcggcctgggcgatccagatcgacgcaccgtcgttgcggatcgaatggttgatgtaggccgacagcaattgataggccgccatcttctctttgcgcccggtgatcgagcggtgcacgatgaaactcttgttcaggcgcatcaggtcgctgacaaacggcttttgcagcaggttgtcgccaatggcgatgcggggtgtcggcaggccggcgtggtacaccgcatagttgacgaaggccgggtccatcacgatatcgcggtggttggccaggaacaggtaggcggtgccggacttgagctgctcgaccccggtgtaagtcacgccgtcggtcgcccggtcaatggtgtggtcgacgtagtactcgactttgtcctgcagcgtggccacggtggtgacgccggcgaattcacggcgcagtttgcgggcgatcatcggcttgagcagccagcccagggcgccggcaaagcgcgggaaacggaagtgggtcaggatgtccagaaaggccttgtcactgaacagacgtgccagcactgccgggacttcgctgtcattgtaaggtcggatggtatcgaattcgcccatcatgctctcttgttagaaacggctagggtaagtaaaggaaataccagggtgcggcccgagtaatgggctcggccaaaaatagccctgtaaatagaccggcgattatacgcacaagtcaccttggaggctgcgatgctggaaagcgcgacgtacgattgtccttattgcggtgaagaggtcgagacaacggtggatttgtccgggggcgatcaggtttatatagaggactgccaggtgtgctgccgaccgatcattttcgatctgcaggtgcatggcgaagaatggatgcttgaaacccgtagtgaaaacgaatagcgggggcgctgatgcaacgaatctacgaaccggaaaacctgatggaaggcgagttgctgcaacagatgctcgccagtgaaggcatcgaggcgcacctggtggggcggcatttgctcggtggcaccggcgagttgcccatcttcggcctgctggggctggaggtggacaatgaccgcgccctcgacgcccgcgagttgattaccgcctatatcggcgcgcaaccgctgccgggcgacgaacccgacagcttccccgacgtgctggtctgttaggctgtcggtcggtttacccaagagtcgtgttgccccatgtgtggacgttatgccttgtttcgctggacccccgcttttgctgccctgccgggctttccggccgatcagcaggcccagtggaacatctccccgaatgattcggtgctgatccagcgcgccgccgacggccagcgcaccctggcccgcgctcgctggggcctcaccccgccctggctgactgatctttcccgcactcccgcccacgcccgcgccgaaaccctggccgaacagccgatgttccgcgaagcattccgtcagcgccgctgcctgctaccggccaatgggttctacgaatggcgcggcacccagcgcaagcgcccgtattggctgacgccgggggagggctccacgttgttttttgccgcgatctgggaggcctatccggtgcaggaacaggtgtggttgagcacggccgtggtgacccaggccgcgcaggcccagcgtcggccactgattctggatgaggccgggcaggcagcctggctcgaccctgagacgccgttgcatgtgttgcaaggcttgctggccagtgagccgagcgcgttgcgcgagcgggtcctggccaacatggtcaatgatcccaagctcaatgggccggagtgcctgaccccggcttagaccttgaactgattgatcagccggcgctgctgctcggccaacttggtcaagtccgcactggccgcgctggattcatccgcgccgcccgccacttcattggccacctggccgatattgatcacgttgcgattgatgtcctcggccaccgcgctctgctcctcggcggcactggcgatctgagtgttcatgtcgttgatcaccgagactgcctgggtgatggtctccagcgcttcagccgctttggccgcatgttgcacgctttcatcggtgcggttctggctgtcctccatcacccgcaccacatcccgcgtgccttgttgcagttgctggatcatggtctggatttcttcggtggccttctgggttttctgcgccaggttgcgcacttcgtcggcgaccacggcaaaaccacggccttgctcgccggcccgcgccgcctcgatggcggcgttgagtgccagcaggttggtctgctcggcaatcccgcgaattgccgtgaggatggcgttgatgttttcgctgtccttggccagggtttgcaccacaccgacggccttgccgatttcctcggcgagcgcgccgatggaggtggaggtgtcacgcacgatgcgcatgccctggctcgcggcctggtcggcatggctggcggcctgtgcggcttgggtggcgttgcgtgcaacgtcttgcgcagtggcggtcatctcatgcacggcggtggcgacctggtcgatctccaccatctgtttgtgcacaccctggttggtacggatcgcgatatcagcggtgtgctccgaagagtcgctgaccttctgcaccgaactcaccacctgggtgatcatgccttgcagcttgatcaggaaggtgttgaaaccgttggcaatcgcgcccaattcgtcggcgcgatcactggtcaggcgccgtgtcaggtcaccctcgccctgggcgatgtcattgagcatcgcgaccatttgcttgagtggccgggcaatgccatggcccaccagccagatcaccagcaggccgataccggcgatcagcaggccggcgatagtcatgccgaaaatatcggtcttgcgctgggtttccaggtcgctttgcagtttctgcgagtcggccattaccgcactcaaaggcagctgcatcatcagggtccagcgtgcatcggtctggccgatgttgaacggcaggaacaactcgatatgcccatgttccttgtcgatgtcgtagcgtacttcgccgattttcagttggcccaggttggccagttcgttgccatcgagcaggtcgctggccttttcgccgagcttgctggcgtccttggtataagccaccaaacgcccgttgctggagatcagcgccagttctccggcaccgttgtagagtttctggtcggcgctggtgagcatgtcctggatgaagttcaccgacaggtcggcaccgacgatgccctggaacgtgccgtcgatcatgatcggctcgataaacgacgccagcatcaccatcgcgttgcccaccttgtaaggggccggatcgatggcgcaggcctttttgctttccttggagcacaggtagtactcgctggcgcgcacgcccgtagagaggattttctggtcggccacgtccgccagcttatccatgcccaggctgccatctgcattgcggtaccaccacggcaggaaacgtccgtcggcgcccatgccgacaatcgggctgttcacgtaggccgcgtcgttgtgatcgatggcgttgggttcccagccgatataggcaccgaggattttggggttgcgcaccacggtttcgtgcagcaggttgatcagttgctcgcggccgagctgcagggcgggttcacccttcgcgtctttcatgccgagcagggcgttggcagtggccaggctcttggcggtcaccagtggcgcttccagttcgcgctggatcaaggtggcctgggtttgcgccagggcggtgaggcgctgttcgataatctgttcgaactgcacttgggtacgctcctgcaccatttcctgggtgcgtgcgccggcaaacaaggcgtagagcaccaacaccgctactacgctcaggacaatggcgccggccagtgccgcgacagaaaattgaatcgacttgaatttcatgaaaactccgggcgcaggggagagggcctgtcttgtgtatcggccgagggcgaggtgggcatgaggggggcgcccggcaaaatcgggggatgtgtcgcaaacagaatgctcggcgccgccgctggcgtgtgagatgtatcggaaaatcagcggttacacgtctggtgtatctggcgtcgatacaaatgtgcgcctacgatacgcgccatgttttaagggcgtgttttcagggagagtgttgatgaagaagtcattggtgataagcgggttggctgcagcgctgctgctggccgggtgtcagtcggtcaacaccaccagcggcggtgccgttggggtggaacgcaagcagtacatgttcagcatgctgtcgagccaggaagtcgaccagatgtatgcccagtcctaccagcagaccttgggtgaagccagtggcaagggcctggtggacaagaccagcgccaacgccaagcgcgtgcaggccatcgccaaccgcttgatcgcccaggcgccgacgttccgtgcggatgcggcacagtggaagtgggaagtgaacctgatcaagagcgacgagatgaacgccaactgcgggcctggcggcaagatcttcgtgtacagcgcgttgatcgacaacctcaagctcaccgatgacgaactggcggccgtgatgggccatgaaatcgcccacgccttgcgcgaacatggccgcgaagccatgtccaaggcctacgggatcgaaatggccaagcagggcgccggtgcgttgttcggcctcggccaggacagcctggcgctggccgataccgtggccaactacggcatgaccttgcccaacagccgcagcaatgaaaacgaagccgacctgatcggcctggagctgtcggcccgtgccggctacaacccgaacgctgccattacgctgtggaacaaaatggccaaggcctcggaaggtgcgccgccggagttcatgagtactcacccggcctccgacagccgaatcgcctcgttgcaggcggcgattccgaaggtgatgccgttgtaccagcaagccaagaagtcctgacgttgtgaagatctaagtgtgggagggggcttgcccccgatgcgttgggtcagcccattagatgcctactgacactccgccatcgggggcaagccccctcccacagggcccctttagatccagccgctgctttgcatggctttgtacacggccacgatagccaggatgaaaaacgccgtagccgccaaccgacgaatcaacgtcaacggcagtttctccgccgcaaaattccccgccaataccaccggcacgttggcaatcagcatgcccaaggtggtgccgataatcaccagccacaactccgggtactgcgccgccagcatcaccgtggcgatctgcgtcttgtcaccgatttccgccaggaagaacgcgatcagcgtggtcaggaacggcccgaatttgcgcgtggtgctggcttcgtcatcgtcgagtttgtccggcaccagggtccacagcgccgtggcgcagaagcttgccgcaagaatccagtgcaacaccgcgtccgagaagaaacttccgaaccaggctcccacggcaccggcggctgcatggttggccagggtcgcggcaacgatgccggcgatgatcggccagggtttgcgaaagcgtgcggcaaggatgagcgcgagcagttgcgtcttgtcgccgatttcggccaaggcaacgattgcggtaggaacgagcaatgaatccagcatcaggtaggtttccaggggcgggtcgacacggctatgacacgtacagccttcccgccccgggtaaggtgtgcgtgtcataggtcttgtcaaaccccggtccgtctgtgcggactcctgggtcgcatacgccatggtctgctgaccaagtatgttgacgtatgccggacgagcgtggcgctcgtgggagactactcccctaggacggagcggattctgcctaggcaaaacccattcggcaagcgttctttttcaaacgcccgtcagccgcgcttggcgcggtagatgcgaaaaccgttgccttcagcctttactccacacacgcccaagtgctcttcgatcagcggctggtacttcaggaaactgttggcgaccaggcgcagttcgccgccttttgccaggtgtttcgctgcttttcgcagcaggttttcggtggcgaaataatcggtatgcaccccgacatggaacggcgggttgctcaaaatcgcgttcaaacccatcggcgccgcgtcgataccgtcacccgtcaatacttcggcttccagaccgttggcagccagggtcaggcggctgctcgcagcggcaaaggcgtccacgtccagcatcgtcacgctgttatgcgggtagcgacgtttgaccgcagcccccagtacaccggcaccgcagccaaaatccagcagatgcccgctcggcagtttgtccaggtgctccagcaacagctcggtgccgcgatccaggcgaccgtggctgaatacccccggcaagctcaccaccttcagcgggccttcggccaatggcacctcgaaaacctgcgccaggctttccagttcgaccgcttgcggcgcattggccacggtgacctgccacagctggcaatgccgtgcgttgtcgagcttgcgcggcttgccaaaggggatcatctgcttggccgcgctttcgataccggcctttttctcgccgaccaggaacagctcggcgccgggcaggcgtgcagccacggcgttgagcaggtagtcggtcaggtccttggatttgggcaggaagatcaccgccgcatcgaacgcccgctcgggcacattgacaccgaagtggctgcgctcggcaaagcgtgcatcgagcgccgcctggtcgccggcatgccagctccagccgtgggcgttgggcaggcgaccgagcaggtcgtcggcgggcaagcccaccaacagcaggttgccttgaaaaagttcggcctggcgaagcagtacttcactgcgcggatccatggtctgctccttgaaaaggggcgcagtttatcaactgacgacgcgcagcggggcgccgctgaaaaagccccgggcgttttccgccagttggccgacgatgcgctgccgcgcttcgcgactgccccaggcgttgtgcggggtgacgatcagccgcggaatatcgccggccagcagtgggttgccattcaccggcggttccacgctcagcacatcggtagccgcgccacccaagtggccgctactcaacgcatcggccagggcctgttcgttgatcaaaccaccgcgcgcggtgttgaccacaaacgcgccgggcttgagcaacgccagttcgcgggcgccgataaagtcgcgggtgtgttcattgagcgggcagtgcagggtgagcgcgtcgacctgcgccagcagttcatccaatggcacgcggtcggcgcgggcagggcgccccggaatcgcaccgagcagcacacgcatgccaaaggcttcggccaggcgcgccaccgcgccgcccagttcaccgtggccgagcaggcccagggtcttgccttccagctcgacaatcgggtggtccagcaggcagaactgcttggcctgctgccacaggccggcgccgacgtcccgttgataatccttcaagcgcgtcgccaggttgagcagcagcatgatcgtgtgctgggccaccgacggcgtgccgtagccctggcagttgctcacggtgatgccgtgggcgcgggcggcgtcgaggtcgacgttgttggtgccagtggccgacaccaggatcagattgagctccgggcaggccgccagggtttcggtgttgagggcgattttgttactgatcaccacttgcgcgccttgcacacgttcaaccacgttctgcgcagtggtgtccgtaaacaactgcaactcgctgaagctgttgcgcaattcgctgaggtcaaggtcccccaagtccagggaaggatgatcaaggaagacggcgcggcgattgttcgtcatcaactgtaccttttgcgacagggttcgaaggcgtaatctgccgagcctatcagatgaaataatccgttacttaatggagtgagtatgtacgccgccgagttcttgaccgtagccctgattcacttgttggcggtggccagccccggcccggatttcgctgtggtggtgcgtgaaagcgtgacccatggccgccgcgctggcacctggaccgcactgggcgtgggctcggcgattttcctgcacgtgggctactcgttgctcggcatcggcttgatcgtgtcccagtccatcgtgctgttcaacgcgctcaagtgggcggcagcggcctacctgctgtacatcggcttcaaggccctgcgcgcgcaaccggccaagccccccgttgaaggtgagttgcatcgcgaagcaggcgaacgtacgccgcgtggtgcgtttaccgccggttttgtgaccaacggcttgaaccccaaggccacgttgttcttcctgtcgttgttcaccgtggtgatcaacccgcacacgccgctggcaatccaggccggttacggcgtgtacctggcggtggcgacggcgctgtggttctgcctggtggcgatgttgttcagccagcagcgcgtgcgtgccgggtttgcgcggatgggccattggttcgatcggaccatgggcgcggtgttgattgcgattggggtaaagctggccttcaccagcatgaaataagctggatgctggcgcaaagctagcattcgctggggtctgcaaatcattcctttggctgatttggctgaaacataaggtctctaaagtgcaggtcttcaagccaagaccgtgcagtcagaaaagggattcgtatgttgcagacccgtgttatcccgcccgccgaaggtgcgtaccaatacccgctgttgatcaaacgcctgttgatgtccggcacccgctatgaaaagacccgggaaatcatctaccgcgaccaactgcgctacacctacccgaccctgatcgagcgcgtcgcccgcctggccaatgtgctgaccgaggccggggtcaaggccggtgacacggtggccgtgatggactgggacagccaccgttacctggaatgcatgttcgccatcccgatgatcggcgcggtgatccacaccatcaacgtgcgtttgtcgccggaacagatcctgtacaccatgaaccacgccgaggaccgcttcgtgctggtcaacagtgagttcgtggggctctaccaggcgattgccgggcacctcaccaccgtcgacaagaccttgctgctcaccgatggcgaggtcaagaccgccgagctgcccaacctggtgggggagtacgaaagcctgctggccgccgccagcccgaagtacgacttccaggatttcgacgaaaattccgtcgccaccactttctacaccaccggcaccaccggcaatcccaagggggtgtacttcacccatcgccaactggtactgcacaccatgggcgtggcgaccatcatgggcagcgtcgacagcgtgcgcctgctgggcaccaacgatgtgtacatgccgatcacgccgatgttccatgtgcacgcctggggcctgccgtatgtggcgaccatgctcgggctgaaacaggtctaccccggtcgctacgacccggaatacctggtggagctgtggcgcaaggaaaaggtcaccttctcccactgcgtgccgaccatcctgcagatggtgctcaacgccaaggccgcccagggtgtggattttgaagggtggaaaatcgtcatcggcggcagtgcgcttaaccgttcgctgtacgaagcgtccaaggcccgtggcattcagttgactgcggcgtatgggatgtccgagaccgggccgctggtgtcctgcgcccacctcaacgaagaactgatggccggcaccgaggatgagcgcaccacttaccgcatcaaggccggcgtgcctggcccgttggtggaagctgcgatcatcgacggcgacggcaacttcctgcccgccgatggcgagacccagggcgagctggtgttgcgtgcgccgtggctcagcgaaggctatttcaacgagccacagaagggcgccgagctgtgggccggcggttggatgcacaccggcgacgtggcgaccctggatgcgtttggcgtaatcgacattcgcgaccgcatcaaggatgtgatcaagaccggcggcgaatggatctcgtccctggccctcgaagacctggtcagccgtcacccggcggtacgcgaagtagcggtggtgggcattgccgacccgcagtggggcgaacgcccatttgccctgctggtagtgcgtgatggccatgtgataggcgctcgcgagctcaaggaacacctcaagccgttcgtggaactgggccacttgagcaagtgggcgattccgagccagattgcggttgttactgaaattcccaagacgagcgtaggaaaactcgacaaaaaacgtatccgtatcgacatcatcgaatggcaggccaacaacagcacgttcctgtctaccctgtgagctgactcgccgtgcccttgtggcgcggcaatgctctatctcgcgccttcacttgtgatttgccgattttcagccatccttgccgcgtcggcctttgtcgacatggcgaaagggtcgtggcagacgggtcggtgatgcaaatcacactttagagggatcaagcactaccccctgctggctatagtcccttccagagtttttcacggatgttccgcttcgggccatgggggctcggctgccgagcggcattggaatcgttgtattccggccgttacatgcatcagtaggaaaaaactcactgccataacaataatgcacatggagtagcgtcgatgacctcagtaaaccagttctggcgccgggcaagactgcccctggccgtcagtctcgcctctacgctcgccgggcccgcattcggcgtcagtttcaatatcggtgaaatcgaagggagttttgactcgtctctttccgtgggtgcgagctggtcgacggccaagcccaaccaggacctgatcggggtcaacaacggcggtaagggcctgtcccagacttccgatgacggccacttgaacttcaagcgcggggagacgttctcgaagatcttcaagggcatccatgacctggaactgaaatacggcgataccggcgtgtttgtgcgcggcaagtactggtacgacttcgagctcaaggacgaaagccgcccattcaaggacatcagcgacaacaaccgcaaggaaggcgccaagtcttctggcgggcagatccttgatgccttcatctaccacaactacaacattgccgatttgccgggcaacgtgcgcttcggcaagcaggtggtgagctggggtgaaagtaccttcatcggcggcggcatcaactccatcaacccgatcgacgtgtcggcattccggcgtccgggcgccgaaatcaaggaaggcttgattccggtcaacatgttctatgtgtcgcaaaccctgaccgataacctgtcggccgaggcgttttaccagttggagtgggaccagaccgttaccgataactgcggcacattcttctctcagcctgatgttatttccgacggctgcagtgacaatttgcgcgtgttgaacagtcgtcgcttcctgcctgccgcagtattgccagggcttgccgccaatggcgtcgacgtcaataacgaaggtgtattggtgcgtcgtggcccagatcgtgatgcgcgcgacagtggtcagttcggtgtcgcattccattacaacttcgagccgctggatacagaattcggcgcttacttcatgaactaccacagtcgtgcgccgatcttcagtgctcagggcgcaccgcaatcgaaatacacaggtgcaacgcctggtgtgccagcccaactgcgtccattggtggtcgcgggtaactccaactactacgttgaataccccgaggacattcgtctctatggcttgagtttctccaccaccctccccacagggaccgcatggagcggcgagttgagctatcgtcctaacgcgccggtacaactgagcacgacagacattctttttgccggtgtcacgccacttccccccttcaacaacgcgtctgtgttgaaggggacgccaggccaggacctgcacggctaccgtcgcaaggaagtcacccagttccagaccaccttcacgcacttcttcgatcaggtcatgggcgccagccgcttgaccactgtcggtgaaatcggcgtgactcacgtcggtggcctggaaagcaagtccgaggcacgttatggccgtgacccggtctttggcccgggttcgttgccaggtggtttctgcaacacgctcaacaactccacggcgcaagggggtggtttgcctaacgccgcgagcctgaacaccaactgcaacaacgacggttacaccaccgccacatcctggggctaccgcgcccgcgccatctgggaatacccggacgtgttcgccggcgtcaacctcaagccaaacgtggcgtggtcccacgacgtcaaaggttactcgccaggccctggcggtaacttcgaagaaggtcgcaaggcagtcagcctgggcctggatgccgaatatcagaacacctacaccgccagcctggcctacaccaacttctttggtggcaagttcagcacggtggatgaccgcgactttgtcgctttgagcttcggcgccaacttctaagcacactgcatttcaggaagaaccagaacatgaaaataaccaaaagtctgttgcacgtgggtgtgcttgggctgtcgatcctggcgagtaacgtcatggcggcagtctcggcggatgaagccgccaagctgggcacgagcctgaccccgatgggcgccgaaatggccggtaacgctgccggcaccattccaaaatggtcgccactgcccaccaacgccggcgccgtcgacgctcgtggattcctggccaacccgtacgccagtgagcaaccgcaattcaccatcaccgcagcgaacgtcgagcagtacaaggacaagctggcaccggggcagtacgcaatgttcaagcgctaccctgacaccttcaagatgccggtctacccgacccatcgcggcgccacggtgccggcggatgtgtttgcggccatcaagaagaacgcctctaacaccaacctggtgtccggcggcaacggtctggagaacttcgagaccgctatcccgttcccgatcccgaaaagcggcgttgaagtcatctggaaccacatcacccgctatcgcggcggcagcgtgactcgcctggtgacccaggccacgccgcaaaccaacggttcctacagcctggtgtacttccgcgatcagttcgtgttccgcgacaagatgaaggattacgacccgaaaaacccgggcaacgtgctgttctacttcaagcagcaagtgaccgcgccggcgcgtctggccggtggtgtgctgctggtgcacgaaaccctggaccaggtgaaggaaccgcgttcggcgtgggtctacaacgccggccagcgccgtgtgcgccgggccccgcaagtgtcttatgacgggccgggtaccgcagccgatggcttgcgtacatccgacaacctcgacatgtacaacggcgcaccggatcgctacgactggaagttggaaggcaagaaggaaatctacatcgcctccaacagctacaagctcgacgatccgaagctcaagtacgccgacatcatcaaggccggccacatcaaccaggacctggctcgctacgagctgcgccgtgtctggcatgtggtcgcgaccttgaaggaaggccagcgccacatctacgccaagcgtgacttcttcatcgatgaagacacctggcaagcggcagtgatcgaccactacgacggtcgtggccaactgtggcgcgtagcggaggcccatgccgagaactactacgacaagcaagtgccgtggtacgccctggagaccctctacgacctgcagtccggccgctacctggcgctgggcatgaagaacgaagagaagcaggcgtatgacttcggcttcaccgctaccaccagcgacttcaccccggcagccctgcgtcaggatggtgttcgctaagctgcacgcgtaactcaatgcgggagggggcaagcctcctcccacattttttgtcgcagttctttttcagtcatttgtagcaaagatctacaaacctgccgcttttaccgctagtctgcggacatctgcaatgccgaccacagccttctacaagagcccggcgatgactgatctgtcccgaatccaagggcctgccagtgcggtaatcccgaccctggaaggtcgcttctacagaccccccctgcctgacggctacgtgctgcgagcgcgcctgtgcgaacgcctgagcgccgggctggacgggcgcctgttgctggtcagcgcgccggccgggttcggcaagagttcgttggcggtggagttctgtcagagtctgccgaaccattggcacagcctgtggctgggcctgagtccacgggacaacgacccagggcgtttcctcgagcgcctgctcgacggtctgcagcaatttttcccccaactcggcgcccagtccctgggcctgctgaaaatgcgccagcgtcaccagccctttgcgtttgaggaatggctggatggcctgctcgacgagctggccgtgcacctgtccacccgtgcgccgctgttgctggtactggatgactatcacctggcccaggggccggtgcttgaccgctgcctgcagtttttccttaatcatctgcccgatggcctggtggtgctggtcaccagtcgtcagcgcccggactggcatctggcgcgcctgcgcctgtcgcgccacctgctggagttgaatgaacaggacctgcgcctgacgcacgacgaatcactggccctgctggatcgccacagcagttccctgcgcggtgaagcgctcgacaatctgatccgccgcagcgaaggctgggtcgccggcctgcgcttctggttgctggccgcctccgaggccggcagcgatggcggcttgccgcagaatctgcacggcggggaagggctgatccgcgattatctgcttgaagaagtgatcgactgtctgccggccgaagtacaggcgtttttgtacgatacagccccgcaggatcgtttttgcagcgaactctgtgatgccttgcgtgaagctcacgacagcgccgaaatcctgcgctacctgcaagcccatcaagtctttctggtgcctctggacgaacaggggcactggtaccgttatcaccacctgttttctgacctgctgcgcacccgacgcgccagtagccatgtactgccggccgccagcctgcacctgcgtgcgtgccgctggttcaatgcccagggcttgatcgatgaagcggtggagcaggcgttgcgtgccgggcacctggatgtggcggccaacctggtgcagaacctgtccgaagaacaactgctggccgagcagaatgtgggcatgttgctgcgctggaagatggacttgcccgatagcctgctgatcagcacgccgcgcttgatcgtgctgtacagctgggcgttgggcctggcttgccaattggacgcggcggaagagttatcaagctacctcagccgcttcctgccggcaccgtcggccaccgcgcaaaaatcgatgttggcgcagtggctggcactgagtgggatcatcgcccgaggcaggggggatcgtgagttgacccaacgctattgcagcgaagcgttggaaagcctgccgcaacggcgttacggccagcgcttgatgtgcctgtcgacgctctccaacctggccatcgtcgatgccgacctttggcgcgcccgtggtttgaatcgtgaatcccttgagctggcgcagcgggtaggcaacccgttattcgaggccctggcccattacgaccgtgcgcgggtgttgcaggcacgcggcgaaatcctgcgttccctggatgaggtgcgccagggcttgcagcgcctgcatggcctggcgccgcaacgcttgtacgcagtacgtgcgcggttatcgctctacgaaggtttcttgctgctggtgcgcctccagcctgaagccggcctcgctcgcttgcgcgccggcctcgccgaagcccgtgcttgccgcgatatcagcgtgttgatcggtcattgcgtgatcgccagtttcgaagggcgccggggtgacttcgccaaggccttcgccgaacttgccgaggcggagcgcctgatgcatatctgggacgtgccgccgatctactacctggcgatgatcaccctgatcaaatgcgagctgtggctggcccagggccgcaccgacctggccgacgcctggctgacccgcctggggcagacctacaacggcgaacacgctgcggccgcaccggagttccacccgcacctgccacagcatatcgggctgcaacaggctgcgctggatgccacgcgccaccaaccggctgcagcgctgcaacgccttgatgaactggcgcagcaggcgcatcacagtgggcgacagatgatcgccctcatggcgctgacccagcaggcgcagttgctgctggagagcggccaggaggccaaggcgtttccggtgctggcccaggcgctggaggcgggggtcggtggcgcgttgcaacctttccagcgtctgctggaaaaccacccggactggatgcgcgagcaactcgccaaagacccccatggcctcttgaacgagagcctgctggcgctgttgcccgccgccttggtggtggaggcggtgtcgactcaagaaaccttgagcgcacgggagctggccgtgctgcaactgatcgctcagggctgttccaaccaggagatcagcaatcggttgttcatctccctgcatacggtgaagacccatgccagccacatcaacagcaagctgggcgtcgagcggcgcacgcaggcggtggcgcgggcgcaggagctgaggttgattggctaggcctgggcttttgcgaaagccgcggccatggagtcttgttctcgctgcgaaagaccaaccgcttgagccacagtcctccaatggctgactgagttgatgcagtcagcgatgatttcatccgccttcccaaggttcacacggaagaaaccggcgacttctctcgccagttccagatccagcgcattgtcgtattcggtgatattgagtttcaggccgtctcccagtggcgtgggattcaagtcatacgcatccgaaaggcgccatccgttgcctggctccaggataaagccatgattgcgcaagtggtcgtcggtgtttgaaaccagaatattgaaaacgatgcgcgtccacagctcttgcagatcctggtcggtattcgagccgctgcgcatcagcacttcagctagctccaggtaacttgcgcctgagctggcgtcgtcaccatcgactcggcctgtgagcgtcatggcggatgcaaagtgcaggcggcccccagcagtcgtccggtcgaaacgtttgaccatgaagcaatgaaagtcgctggcatagcgcttgccgatcgccgaggcgacgttcaggccgcagcccttggccagggcgttgacgaccagctcccagccgcccacatcgtaggtgtcgcgggtcgagggaaacttggcgatccatagatggttatcgtggtcggcgacgctggctttcggacgtgcgccgcccagggaaccgccgggtgcaatcaacatgcgtagccattgccggccttctggggcctgattatccgggtcgttttccagctcgcgactggctctttccagcgcatgcagctcgacaaaaggcggcgcggcaatggcgtcctgatcatcgagaaaactgccggtatcgttcagccggtagcgtagggcgccggtgcggaagaggtcgtgtacgccaagcagatagtccgactcgccgagccgagtattcgcctcgtatagcccgtcgcggatgtcgcgttccaggcgtcgtttcatcaacaatcgcccccagcgatccgggcaggagtcgctgaagacaccaaacatgtttcgcccctcaacggggaactgagcgcctgcataggggccgatgcctggatcgatccgaacggcgctcagcacccggtcttgcaatgccagagggtcgctttcgtactcgaacttttcggtcatccgggtttttcttgcgtgcagccaaccaagacgccgggggccgtcgataccttcccagtcggcataaaccccaatcatggtcattacgtgtctgtcctttgccgtggtgggatcagtgcggccagtgcatcgctgctgagcgtgcccttgtcgggagggggcataggctttgaaggtagtggcttattgcgaacgatggcgttgtttcttgtaactttctctgacgccatcggcttattcgggcgcggggttgatgccttgcctgtcagcagtgttgcatcctgcagatgtcggcccagctcatcgtccgctgccacggtgttcaggtctttttcgaggcccagcacctgcaatatcgccaggtaagcgcccatggtactccccgaagaaccacgctccagtgcgcgaagtgtcatctgggacatgccggcgcgctcagctgcttgcttggcggtgatttttcggcgcaggcgcgcaagcttgatccgctcgccgaggtccgaaagcagacgctctgtagggggcagcaagggggcgatctttttagccatgctgttattcctgcactttttggcactaagtgaaagaataatagcatttatgttgttttctaaagtgcaattattctggcgataaagcgcgcgaagttatagtttaattgcattgaccaagattcagaggatcacccatgacgctcacggcttccacgctgattcgcgaaaccttccccgtaggccccttgcagtgcaactgcaccatcatcggcgatcccatcagcaaaaaggccatcgtggtcgacccgggtggcaaccatgagctgatcctggcgcggctcgatgctctgggcctgaaggtggtcagtattatccatacccatgcccatctcgatcatttcctggcgtccggccagttgaaggaaaagaccggcgccaccttgcacttgcacaaagaagatcaattcctttgggacaacctggaaatgcaatgccagatgtttcgcgtgccctataccccggtgccttcgccagatcgctggctggagcatgatgaagagttggcctgcggctgtggtgtggcgttgcacacaccgggacatacgccggggtcgatgagtttctggtttgccgatgccaagctgctgattgccggcgacacgctgtttcgccgcggtatcgggcgtacggatttgtggggtggagaccaggcgaccatcgtgcgttcgatcaagcagcggctgtacacgctggatgagggggcaacggtggtgaccggtcacggaccagatacccgattgggtgatgaaatgcgtgagaacccttttgtacgggcgtgacggaatgattgccgggttagaggcaagcgttgcagcaaaaactcaggtcgggttcagcgtgcgtctgctacggttgctgtagcgacggaatttttgccgtttgtcgtgttccaaactcggcacaggtccattgccaatgtcctttgcaccatagaatgcaaaagtaggagctcccttcatgttcacttcgcgtcgtctgcttgttgttgctaccgtcgtagccctgttgtccggctgcgcatcccctaacccttatgacggcagcagccaggggcaggcgagtaatgaatccggcggtatgagcaagaccgccaagtacggcggcctgggtgccctggccggtgcgctggcgggtgcagccatcgaccataacaaccgtggcaagggcgcactgatcggtgcggtcgttgcgggtgccggcgcagccggttacggctactacgccgaccagcaggaaaagaaactgcgtgaaagcatggccaataccggtgttgaagttcagcgccagggcgaccagatcaagctgatcatgccgggcaatatcactttcgccaccaactcggatgcgatctccagcagcttctaccagccgctgaacaacctggccaactcgctcaagcagttcaaccagaacacgatccagatcgttggttataccgacagcacgggcagccgccagttgaacatggacctgtcccagcgtcgtgcgcagagcgtggccaactacctgacgtcccagggcgtcaacggtgccaacctgagcgcacgcggtgccggcccggataacccgattgccagcaacgccgacgtcaacggccgcgcccagaaccgtcgtgtggaagtgaacctcggtccgatcccgggccagcagtacggccagccaggtgctcagcaacaggcgccacagcagaacaaccagttccagggcaacccgtactcgcagtaccagtaaacattcgctaataaaaaagggcgcctatgtaaggcgcccttttttgtagctgtcggttacatcagtcgatgtattcgaacaccttcacgatcttctgcacgccagacacaccctgcaccagattggctgcacgcgtggcttcggcctgggtcagcagacccatcaggtagacgataccgttgtcggtcacgaccttgatgcgcgaaccggggatcgcgttatcggtgagcatctgcgccttgatcttggtggtcagcagggcgtcattactgatggccagcagggtgattgggtccatcacctgcaattcgttatgcactttcttcacgcgctgtacggcagcggcggcttgctcggcctgggccttgaggtcggcgcgtggtgtctggccggcgagcaaaacaacgccgttgaagctggtcacgacgatgcgcgatgcaccgttgcccaggtcggtcgcggccttggcgacgttgacttcaaccttggtttcgatcagcgagtcgtcgattttgctgccgaaggtacgggtgcccttgtcatcctggataggggtgtcgcgtgttgcagtgatggccgtgctgcagccgctgatagcgaggcacagggtgatggccaaaaggctgaggcggttaacggtcattcttcactcccaaacagttggctgtcgatcagatcgcacaggcagtggatcgccagcaggtggacttcctggatacgtgcggtgacattggccgggacgcgaatctccacgtcttcaggcaacagcaatgaggccatgcccccgccatcgcgcccggtcaatgctacgacaatcatttcgcgatcatgtgcggcctggatcgcctgaataatattcgcagagttgccgctggtggaaatcgccagcagcacgtcacctggttggcccagggcgcgaatctgcttggagaagatttcgttatagctgtagtcgttggcaatcgaggtgatcgtcgacgaatcggtggtcaacgcaatggccggcaagctcgggcgctcacgctcgaagcggttgagcagctcggaagagaaatgctgggcatcgccggccgaaccaccgttgccgcacgaaagcattttgccctcgttgagcagggcgttgaccatgacctgactggcttgctcgatgtgcggtgcaagtacgtccatcgcctgttgcttggtgtcgatactggcctggaaaagctggcgaattcgggattgcatgtccatctgtgtgaccttaagtagcgcggctgtatggcacaggaatgtgcagcccgcaaagcaaagagcaaaagtgtgtggtgaagatgtccggcgaatcagctgtcgaaggcatttttgagccagttcagatcagcctgaccagacggtgtgctttctatggcaaccacatcgaaacggcagggggcgtcggcccagcgatgctctttttgcaggaagaactgcgcggcaagtatcagcttctgacgcttgcgcccgtcgatactggcgagcgcgccaccccattgtgcgtgttttctgtagcggacttcgacgaatactactgtatcgccgtcaagcatgaccagatcaagctcaccgcgtttacataaccagttctgcgccaataggcgcagaccttgtagttgcaagtacttcagggcttgcagttcggcgtccttgccgctttgtgcgctggaccgctcgggcatcagcgcggcgtgtccggcaggcgctggatctcgccaccgacaaacttggcccatggcatctggcgatcaacgcgctggttggcgctgatacccaggttgcccgacaggccgtcaacacgggtatccggcagtgccttgagttgccccaggcgcggcgccaggcggtaggcgtcgacgcccatcgcatacaggcgaccgaggctgccattggcttgtggccattgtgcagccacctggttgcgcagtgggtcggtggtgttgagcaaccaaggcgtttcgcagaacatcacgttggtcatgtccaggtactggttcttgtcgccgctggcactgaacacgtgggatgtggcgtacaccggcacgtcgccggcgtattggaagttcaaggtcggcttgatctgctgggccagttgcgggggcacggccaggaagatgaactcgatgtcctggcgacgcgacggctgcgcggctacgtcggtgccgacggtgctttgcaggctcttggcgcggccttcgcttttgcgcagctggaacagatcggcaatctgctgggcgagggcgacgggctgatcgacatattcaacccccatgacctggccgccattggcttcccagtcctggcggaaggctttgtagacacgctcaccccattcgccacgcggaaccatggcagcggcgcgatgcaggccgtcggcacgggcgcggcgcgacacttcgcgggcttcgtcttcagcggccaggccgaactggaacagttgcgccgggctgcgatcagtctcgctgtagttcaaagccagggtggtgatcggcaactgcgggcgggcactgagctgcttgaccagcggcttctccagcgggccgactaccagttgtacgccagcggcctgggccttggcgtagaagtcgtcgagggaggtcaggcgcgagctgtcatagaactcgatgaccggtggcttctgcccggcctgttcggcctggtagtgcgccgccatgaagccttcacgcagcgccttgccgacggaggccagcgggccgtcctgtggcagcagcagggcgatcttgttcaggggctggctggccagttccttgagcttggtcagtggtgtgggcagttgcacggcagccgggtggcccgggttctgtgcgcgccaggtgtcgatggcagcctgttgctgctccagcgtaccggcgcccttgaccgcttgggccagggtgatccaaccgtccaggaccggattgccgctggcttgcagctgttcggccggcacggcggcaatcagggcccagatggcttcgtggttgcttttggcggcatcacccgtgagcagtggggccatggcgacacgttcccgggcggcagccagggtctggccgtcggcctcataagcgcgggcgtgcacgctgccggtacggatctgctgttcaggcggcagctccttcaggctttgcaggctcggatggttcaaggcggtcagcgcagccttgggctggttgcgcgccatggccagttcggcggccagggtgctggcaaacacttgcgcggcgggcttgaggacatccaggggcacttgcgcaagaatctgcgacgagcgcccggggttgttctgcttgtaggccatgtctgccgcactcaggcgcagcaacgcggccttttctggcgtcttggcggtggtggcctgttcgagcagttgctcgatactggcgtccggggtccgtggaaggtcgccaaggctggacgagggcgagctggcgcacgcggccaacaaggcagcgaggcagagggcggagagcagccgcaggcaagcgatcatgtaagtgttcctgataccgatcaaattagcgtggaattgtacccaagcactggcccaggcgcgatgttactggcgtgaaaccatcgatttaggtcgtgcaaatgttgcagctggcgccaaacggctgaaaaggcatcggccgtggtggcatattttcaaggcgcctacgcgctacaatgtcgcttttgccaaccatcgaggtgtgcgttttgactgctccaggtcctttgaattccactgcaggctcgctttttgtcgtggcgacgcccattggcaacctggacgacatcagtgcccgggcactgaaagtgttgcgcgaggttaaattgatcgcggctgaagacacgcggcactcccagcgtttgatgcagcattttggtatcagcacgccattagccgcctgccacgaacacaacgagcgtgaagaaggcagccgttttatcgtgcgcctgttggccggcgacgatgtggcgctgatctccgacgcgggcacgccactgatctccgaccctggctaccatctggtgcgccaggcacgggccgctggtatcaatgtagtgcctgttccgggcgcgtgcgcgctgattgcggcattgtcggcggcgggcctgccgtcggatcgttttattttcgagggtttcctgccggccaaggccgtcgggcggcgcgcacgcctgcaagcgttaaaggaagaaccgcgcaccttgatcttctatgaggccccccatcgcatcctcgaatgcctgcaggacatggagctggtgtttggcggcgagcgcctggcactgctggcccgtgagctgaccaagaccttcgaaaccctcaagggcttgccgctggaagagttgcgtgcgtttgtcgaaggtgacagcaatcagcagcgcggcgagtgtgtggtgctggtggcaggctggaccgcgcctgaggacgaagatgcggtgggcagcgaagccatgcgcatccttgacctgctgctcaaggagatgcccctcaagcgtgcggccgccctggcggcggaaatcaccggggtgcgcaagaacctcttgtatcaagctgcgctggataaacagaaagccgaatagttccggggttgaaccggtattccgtctgaacgtgatggcaattctgaacttttattacttgtcctaagtccgccgtgccgttaacctgcgcggcggagagtcgattggacagtcgctgccctctatgaaaattaggggggggaggaaagtccgggctccatagggcgaagtgccaggtaatgcctgggaggcgtgagcctacggaaagtgccacagaaaataaccgcctaagcacttcggtgccggtaagggtgaaaaggtgcggtaagagcgcaccgcacgactggcaacagttcgtggctaggtaaaccccacttggagcaagaccaaatagggtcccaaggcgtggcccgcgctgggaccgggtaggttgctaaagatgtccagtgatggccatcgtagacgaatgactgttcaagacagaacccggcttatagatcgactctccacctttttccttctgtccgaatctcgagcagaaacccggtagtaacgcaagaatccctccctgccgaatcattggcagatgcatcttcgtaataccaaaaaaatcttactcttaataaattactttaagttcagcctatagctctttgagctatttgtgcttgttgggccaaaaacatcgccgaactctggtttctcctccctttacgctcctaaatctccgttctgtaaggcttttccttgaatccgcgccttgacggtgtggtgggcgcattcctatagtgtgcgcaagtggcggaaagtggcacaaagtgggttttttgaacgtaaaacgctaaaatttggagaaacgcatctgtgtttcgcggagctaacgctatcagtctcgatgcaaaaggccgtctcgccatgccgagccggtatcgtgacgagctcatttcgcgaagttccggacagttgatcatcaccatcgatgccgttgacccttgtttgtgtgtttacccgctcgatgagtgggagttgattgaaaccaaattgcgcgccctgccttcattgcgtgaagagaaccgccgcctgcagcgtttgctgattggtaacgccgtcgaccttgagctcgatggcagcggtcgtttcctggtgccgccgcgcttgcgcgaatacgccaagctcgacaagcgcgcaatgctggttggccaactgaacaagttccaattgtgggacgaagatgcctgggatgctgtttctgcagctgacctggctgctattcaacaaccgggcgccatgcctgatgaactgcgtgatttgatcctgtgactattgatagcggctttaaccacatcaccgtactgcttgacgaagccgttgaggctctcgccgtacgcgcggatggctgctatctggacggcacgttcggcaggggcgggcatagccggttgatactcagccagctcgggtccgacggcaaactcctcgggttcgacaaagacccccaagcgattgccaccgggcaagcgctagcggccgaagacggccgctttgtcgttgtgcagcgcagctttgccgagctgggtgccgaagtcgccgagcgcggcatggcgggcaaggtggccggggttttgctcgacctgggcgtgtcctcgccgcaactcgatgacccggagcgcggcttcagtttcatgaacgacggtccgctcgatatgcgcatggacccgacccgtggcgtcagcgccgcacagttcattgccaccgcgccggtggaagaaatcgcccgtgtgttcaaggaatacggtgaagaacgcttcgccggccgcatggcgcgtgccgtggtcgagcgccgcgaaatccagccgttcgagcgcactgccgacctggccgaagtgctgaaggtcgccaaccctgcgtgggaaaagggcaagaacccggcgacccgtgcgttccagggcctgcgtattcacgtcaataacgaattgggcgacctggaggccggcctcgaggctgccctcgaggcgctggaagtgggcggtcgcctggtggtgatcagcttccactccctggaagaccgtatcgtcaaactgttcatgcgtcgcctggtcaagggcgaatccgacaacctgccgcgcaatctgccggtacgtttcgaagcctttgtgccgaaaatcaaaatccatggcaaagcgcagttcgcctccgaagccgagctcaaggccaacccacgttcccgtagcgccgtcatgcgcgtcgcggagaagttgcggtgagcaagcttttcgccaagcccctcccgggcggcagcttctttatgttgctgctgtttgttggcgtgctgatatccgcgattgcggtgtcctacagcgcccactacaaccgccagttgctcaataccctgtacggggaattgagtgtgcgcgacaaagcgcaggcggaatggggccggttgatcctggaacaaagcacctggacagcccacagccgcatcgaagtgctggcgactgaacagttgaaaatgcacatcccgggcgcggccgaagtccgcatggtggcgccatgatgaaacttgaaggcgcactctacccctggcgcttccgcctgatgctcggcttgctggcattgatggtgggtgcgatcgcctggcggatcatcgacctgcaagtggtcgaccgtgacttcctgatcggccagggtgatgcccgtagcctgcgtcacatcccgattcctgcgcatcgcggcctgatcaccgaccgtaacggcgagccgctggctgtcagtacaccggtcaccaccctgtgggccaacgccaaggagttgcaggtcgccaaggatcgctggccggcgcttgccgccgcgctggggcaagacccgaaagccttggctgaacgcctggaagcccaggccaacaaagaattcatctacctggtgcgcggccttacccccgaacaaggccagcaggtgctcgaccttaaagtccccggtgtctacggcatcgaggaattccgtcgtttctacccggctggtgaaaccaccgcgcacatggtcggctttaccgacatcgacgaccacggccgtgagggtgtggaactcgcctacgatgaatggctcgctggggttcccggcaaacgacaagtcatcaaggatcggcgcggcagactgatcaaggatgtccaagtcaccaaaaacgccaaggccggtaagcccttggcgttgtcgattgacctgcgcctgcaatacctggccaaccgcgagttgcgtaacgcgatcatcgagaacggtgccaaggccggcagcctggtgatcatggacgtcaagaccggcgagatcctcgccatggtcaaccagccgacctacaaccccaacaaccgtcgcaacctgcagccggcgatgatgcgcaaccgcgccatgatcgacgtgttcgagccgggttcgaccatgaaagccatctccatgagtgccgccctcgaaaccggacgctggaaacccagcgacaaggtcgaggtgtatccgggtacgttgcagttgggcaaatacaccattcgtgacgtgtcccgtaccgaaggcccggtgctggatctgacaggtatcctgatcaactccagtaacgtgggcatgagtaaggtcgccttcgatatcggcggcgaaaccatttaccacctggcgcagaagatcggtttgggccaacccaccggcctggatttccccggcgagcgcgtgggcaacctgccgaactaccgcgactggaaaaaggccgagaccgccacgctttcctatggttacggcctgtcggtgacggcgatccaactggcccatgctttctctgtattggcaaataacggccgcatggttccgctgagccttatccatgtcgacgaagcgccgaaagccacccaggtgatcccggaaaacgtcgccaagaccatgcaaggcatgctgcaacaagtgatcgaagcgccacgcggtgtgttccgtgcccaggtgccggcgtatcacgtggctggcaagtcgggtactgcgcgtaagacgtcggtgggcaccaagggctacgccgaaaactcctaccgttcgctgttcgctggcttcggcccgatgagcgacccacgctacgccatcgtggtggtgatcgatgagccgagcaaagccggttacttcggtggcctggtctcggcgccggtgttcagcaaagtgatgtccggcaccctgcgcctgatgaacatcacgccggacaacctgccgccgactcaacaagcgaacgccggtccaccggccgccgctgtaaaagccaatggagggcgcggctgatgtctcttagcctgaacaagatttttgcccacgccggccgcgatctgctgatccgcgagttgagcctggacagccgcaatgtgcgcgccggtgacctgttcctggcggtgcctggcggcaaattcgatggccgtgcgcatatcgccgacgccctgcaacgcggcgcggctgccgtggcctacgaagtggaaggcgccaccgtgctgccgatcaccgatgttccgctgattccggtcaaggggttggccaaacagctctcggacatcgccgggcgtttctatggcgagccaagtcggcacgtcaacctggtcggcgttaccggcaccaacggcaagaccagcgtgacccaactggtcgcgcaggcccttgacctgctgggccagcactgcggcattgtcggtaccttgggcaccggtttctacggcgcgctgcaaagcggcctgcacaccacgccgaacccgattgccgtgcaggcgaccctggccgacctgaaaaaggccggcgcaaaggcggttgcgatggaagtgtcgtcccacggccttcaccagggccgcgttgctgcgctggcatttgatgtggcggtgatgaccaacctgtcccgcgatcacctcgactaccacggcaccatggaagcctacgctgccgagaaggccaagctgtttgcctggaatgacttgaagtgccgcgtagtgaacctggacgacgagttcggtcgccaactggccgccgaagaccgtgaatcgcgcctgatcagctacagcctggaagacgccagcgcgtacctgtattgccgcgatgcccaattcaatgacgaaggcgtgcgcgcgacgttggtgacgcctcagggcgaacatcatctgcgcagcaccttgctcggtcgtttcaacctgagcaacaccctggctgccgtcggcgcattgctcggcctggattacgctcttgacgaaatcctgcgtgtgctgcccaagctggaaggcccggtcggtcgcatgcagcgcctgggtggtggcaaacagccgttggtggtggtcgattacgcccacaccccggacgccctggaaaaagtcctggtggccctgcgtccccacgccaagggcaagttgctgtgcctgtttggttgtggtggtgatcgtgatcgcggcaagcgcccgttgatggccgagattgtcgagcgcctggccgatggcgtgctcgtcaccgacgacaacccacgcagcgaagacccgagccagattttcgacgacatccgcgtcggcttcaaagatgtgtccaaggctacgtttgtagccggtcgtggcgcggccatcgcccaactgatcgccagcgccagtgctgatgacgtggtggtgctggccggtaaaggtcacgaggactatcaggaaatcaacggcgaacgccatgccttctccgatctggtcgaggccgatcacgccttgaccgcctgggaggttgcccatgcttaaaccgatgacattcagcgaactgacccaggccctgtcggcccgtgtactgtccagcgattgccgcttcgacggcgtgagtatcgacagccgcaacatcaagccggggcaactgtttgttgccctggctggcccacgtttcgacggtcacgactacctgaatgaagtcgccgccaaaggtgccgtgggtgccttggtgcagcgcgaagtcgcggattccacgctaccgcagctgctggtcgccgatacccgcctggcccttggccaattgggtgcgttgaaccgtgccgcgttcaccaaccccgttgcggccatcacgggctccagcggcaagaccacggtcaaggagctgctcgctggtgtgttgcgcacgcgcggcccggtgctcgccacccgtggcaacctgaataatgattttggcgcaccgctgaccctgctcgaactggcaccggaacacaccgcggcggtgatcgagctgggcgcgtcgcgcatcggcgaaattgcctacaccgtggcgctgaccaagccccacgtggcgatcatcaacaatgccggaaccgcccacgtcggtgagttcggtggcccggaaaaaatcgttgaagccaagggtgaaatcctggaaggcctcgatgcatcgggcaccgctgtactgaatcttgacgacaaggccttcgaaacctggcgtgttcgcgcagccggtcgcaaggtcctgacgtttgccgtgcgcaacgctgcggctgattttcatgcgtccgacattaccgtcgacgcccgtggttgcccttcctttaccttgcacaccccgcagggcaatgagcacgtgcagttgaacctgctgggcaaccataacgttgccaatgccctggccgccgccgctgccgcctacgccctgggcgtgtcgctgttcggcatcgccaccgggcttggcgcggtgcagccggtcaagggtcgtaccgtggcgcagctggcaaccaatggcatgcgcgtgatcgatgacacttacaacgccaaccagtcctcggtctgcgccgccatcgacctgcttaaaggcttcgacggccgcaaggtactggtgctgggcgacatcgccgagctgggcgactgggctgaacagtcccaccgtgaggtcggtgcctacgctaccggcaacgtcgacgcgctgtacgccgtcggcccgaacatggcccatgccgtcaatgcgttcggccccggtgcacgtcatttcgcgacccaggccgagctgatccaggcgctgacgacggctgaacacgacaaacatacaaccattttgatcaagggatcgcgcagcgcggtgatggaaaacgtcgtcgcggccttgtgtggctcaagtacggagaaacattaatgctgctgctgctggctgagtatctgcaacagttccacaaaggcttcgcggtctttcagtacctgaccctgcgcgggattctgggtgtgctgaccgcgttgtgtttgtcgctgttcctggggccgtggatgatccgcaccctgcagaacctgcaaattggtcaatcggttcgtaatgacggcccgcagtcgcacctgtccaagtccggcaccccgaccatgggcggtgcgctgattctgtcgtccatcggcgtaagcactttgctgtgggccgacctgcacaaccgctacgtgtggactgtgttgttggtgacgttgctgttcggcgccatcggttgggtggatgactaccgcaaagtgatcgagaagaactccaagggcctgccaagccgctggaagtatttctggcagtcggtgtttggcctcgccgcggcgatcttcctctacaccactgcgcccagcgcagtggaaacgaccctgatcatcccgatgctcaaggacgccagcattcccctgggcattggcttcgtggtgctgacctacttcgtgatagtcggttccagcaacgcggtcaacctcaccgacggcctcgacggcctggcgatcatgccgacggtgatggtgggcggcgcgctcggcatcttctgctacctgtcgggtaacgtgaagttcgccgaatacttgctgatcccttacgtaccgggcgcgggtgaattgattgtgttctgcggcgcgctgatcggtgccggcctgggcttcctgtggttcaacacgtacccagcgcaagtgttcatgggcgatgtcggcgcactggcgctgggcgcggcccttggcaccatcgcggtgatcgttcgccaggaaatcgtgctgttcatcatgggcggtgtgttcgtgatggaaaccctgtcggtggtcatccaggtggcgtccttcaaattgaccgggcgtcgagtgttccgcatggcgccgattcaccaccactttgaactcaagggctggcccgagccacgcgtgattgtccgcttctggatcatcaccgtgattctggtgctgattggccttgccaccctgaaactgaggtagaaacgagtgtccctgatcgcttcagaccacttccgcattgttgtcggcctcggcaagagcggcatgtccctggttcgcttcctggcgaaccggggcacgtcgtttgccgtggccgatacgcgggaaaatccaccggagctggtcacgctgcgccgtgactacccgcacgtggaagtgcgttgtggcgagctggatgtcgagtttctgtgccgtgccgacgagctctacgtgagccccggcctggccctggcgactccggccctgcaagccgccgctgcgcgtggcgttaagctgtccggcgatatcgacctgtttgcgcgtaacgcgaaggcgccgatcgtggccatcagcggttccaacgcgaaaagcaccgtgaccaccctggtcggcgagatggcggctgcggccggcaaacgcgtggccgtgggcggcaacctcggcacaccggcgctggacctgctcagcgatgacgtcgagctgtacgtcatggagttgtcgagcttccaactggaaaccacccacgacctcggtgccgaagtggccaccgtgttgaacgtgagcgaggaccacatggatcgctacagcggcctgccggcgtatcacctggccaagcaccggatcttccgtggcgcacggcaagtcgtggtcaaccgccaggatgccctgagccgtccgctgatgggcgagggcctgccttgctggaccttcggcctcggcaaacccgatttcaaagccttcggcatccgcgaagagaacggcgaaaaatacctggccttcgaattccagaacctgatgccggtgcgcgagctgaaaattcgtggcgcccataaccagtccaatgccctggcggccttggcactggggcatgccgtcggcctgccgtttgacgccatgctctcggcgctgcgcagctttggcggtcttgaacatcgctgccagtgggtgcgcgaccttgatggcgtcagctattacaacgattccaaggccaccaacgtcggtgcagccctggcagccatcgaaggccttggcgccgatatcgacggcaagctggtgctgatcgccggtggcgacggcaagggtgccgacttcaaggaccttaaaggcccggtggctgaacattgccgcgccgtggtgctgatgggccgtgattccgatctgattgccgccgccctcggtgacgctgtaccgcaagtgcgagctacgtccctggacgacgccatcgcccgttgcaaggccctggctcggcccggcgatgcggtgctgctgtcgccagcctgcgccagtttcgacatgttcaagaactacgaagagcgcggccagctgttcgcccgcgccgtggaggccttggcatgaatttccggaatatcatcaagccgtatccgtcgccgatcatcaccgggcgcggtatcgacctcgatttcccgatgctcgccggttgcctcgccttgttgggcctgggcctggtgatgattacctcggcgtcgtccgaagtggctgccgtgcagtcgggcaacaccctgtacatgatgatccgtcacctggtgtacctggtgatcggcctcggcgcgtgcatcgttaccatgatgatccccatcgccacctggcaacgcctgggctggctgatgctgatcggggcgttcggcttgctgatcatggtgatcctgcccggcatcggccgcgaggtgaacggttcgatgcgctggatcggctttggcgcgttcaacgtgcagccgtcggaaatcgccaaggtattcgtggtgatctacctggccggctacctggtacgccgccagaaagaagtgcgcgagagctggatgggtttcttcaagccgttcatcgtgctgctgcccatggctggcctgctgctgatggagcccgacttcggtgccaccgtcgtgatgatgggcgctgctgcggcgatgctgttccttggcggcgtgggactgttccgcttcaccttgatggtggtgctggccgtggcggcagtgaccgtcctggtgcaggcacaaccctaccggatggcgcgtctgatcacctttaccgatccctgggccgaccagttcggttccggctaccagttgacccaggcgctgatcgcctttggtcgcggcgagtggctgggcgtgggcctgggcaacagtgtgcagaagcagttctatctgccggaagcgcacaccgacttcgtgttctcggtactggccgaagagctcggtgtggtgggttcgctatgcaccgtcgcgctgttcgtgttcgtgtgtgtacgcggcatgtacatcggcctgtgggccgagaaggccaaacagtattttgccgcctatgtggcgtacggcttgtcgttcctgtggatcggccagttcctgatcaatatcggtgtgaacgtcggcctgttgccgaccaagggcctgaccttgccgtttctcagttacggcggcagttcgttggtgatctgctgcgcgtgcctgggcttgttgctgcgcatcgagtgggagagtcgaacccatttgggcagcgaagagatggaattcagcgagagcgatttcgccgaggagccgacccatgggcgctaacgtgctgatcatggcgggcggtaccgggggccacgtgttcccggccctggcctgcgcgcgcgaattccagaaccgtggctacaccgtgcactggttgggtacgccgcgcggtatcgaaaacgagctggtgccgaacgccggtttgccgctgcacctgatcaacgtcaccggtctgcgcggcaagggcaagttgtccctgctcaaggcgccgttcgtgttgctcaaggcggtgtggcaggcgcgcaagatcattcgtgaactgaagccggtgtgtgtgctcggttttggtggctatgtgaccggcccgggtggcgtcgccgccaagctcgccggtgtgccggtgatcgtgcacgaacagaatgccgtcgccggcaccgccaaccgcctgctggtgcctctggcggcgcgggtgtgcgaggcctttccgaagacctttggtgcatcggacaagctgcgcaccaccggcaacccggtgcgtaccgaactgttcatgggcatcgcccgtgaagcattggccgggcgcaaggcgcacctgctggtcatgggcggcagcctgggctccgagcctttgaacaaactgctgccggaagccctggcacaactgcctgtggagctgcgtccagagatcttccaccaggccggcaaaaaccacggtgaagtcaccgccacgcgctatcgcgaggccggtgtggaggcgaacgtacagcccttcatcaaagacatggcccatgcctatggctgggccgacctggtggtctgccgctccggtgcgctgaccgtcagtgaactggccgccgccggtctgccgtccttgctggtgcctttgccccatgcgatcgacgatcaccagacccgcaacgctgaatatttggccggggagggcgctgccttcctgctgccgcaaagaacgactggcgccgccgacttggccgcacgcctgaccgaggtattgatgcaaccggaacgactcaacagcatggcgagtactgcaagccgcctggccaaacctgacgcaacccgcaccgtggtcgatatctgcctggaggtggcccatggttgagaatcagaaagccatgccacagccggaaatgcgccgtatccgtcgcatccacttcgtcggtatcggcggcgtgggcatgtgcggcattgctgaagtattgctgaacctgggctaccaggtgtccggctccgacttgaaagagtcgccggtcaccgaccgcctgaagtcgttcggcgcgcagatctttatcggccaccgtgccgagaacgccgccgaggccgacgtgctggtggtgtccagcgccgtgaacacctccaacccggaagtggccaccgcccttgagcgccgcattcccgtggtgcctcgcgccgagatgctggccgagctgatgcgctatcgccacggcatcgccgtcgccggtacccacggcaaaaccaccaccaccagcctgatcgcctcggtgttcgccgccggcggcctggacccgacgttcgtcatcggtggccgcctgaatgcagccggcaccaatgcccagctcggcaccagccgctacctgatcgccgaagccgatgaaagcgatgcgagcttcctgcacctgcagccgctggtggccgtggtcaccaacatcgacgccgaccacatggcgacctacgacggtgacttcaacaagttgaagaaaaccttcgtcgaattcctgcacaacctgccgttctacggtttggcggtggtgtgcctggacgatccggtggtgcgcgaaatcctgccgctggtcaagcgtccgaccgttacctacggcttcagcgaagacgccgacgtgcgcgccatcaatgtgcgccaggaaggcatgcaaaccttcttcaccgtactgcgtccggaccgtgaaccgttggatgtctcggtgaacatgccgggcaaccacaacgtactcaattctttggcgaccatctgcatcgctaccgacgagggcgtcagcgatgaagccatcgtcgaaggcctgtcgcgctttgccggcgtgggccgtcgcttccaggtctacggccaactgccggtagagggcggcgacgtgatgctggtggacgactacgggcaccacccgactgaagttgccgcggtgatcaaggccgtgcgcggtggctggccggagcgccgcctggtgatggtgtaccagccgcaccgctacagccgtacccgcgacctgtacgacgatttcgtcaatgtactggccgatgccaacgtgctgctgttgatggaagtctaccccgccggtgaggagcctatcccgggggccgacagccgcaagctgtgcaacagcatccgtcagcgcggccagttggacccgatctacatcgagcgtggcgtggacctggcgccaatcgtcaagccgctgctgcgggccggcgacatcctgctgtgccagggcgccggtgacattggtggccttgcgccgaaattgctggcgagcccgctgtttgcggcaaaaaagggagcggcgaaatgatcactgactacgcctccctgttttccacgatcacgcctgccgacttcggtcgcgtagccgtattgttcggcggcaagagcgccgagcgcgaagtctcgctcaagtccggcaacgccgtgctcgaagcactgcaaagtgcgggcgtgaacgcgttcggcatcgacgtgggtgatgacttcctcgcccgcctgcaggccgagaagatcgaccgcgctttcatcatcctccacggccgtggcggtgaagacggcagcatgcaagggctgctggagtgtgccggcattccttataccggcagcggcatcctggcttcggcgctggcaatggacaagttgcgcaccaagcaggtgtggcacagcctgggcattccgaccccgcgtcacagcgtgctgtgcagcgaagacgattgtatttctgcagccaaggaactgggcctgcctttgatcgtcaaacctgcccatgaaggctccagtatcggcatggccaaagtgaactcggccgccgaattgatcgacgcatggaaagcggcaagtacctacgattcgcaagtgttggtggaacagtggatccagggtcccgagtacaccatcgccaccctgcgtggccaggtattgccgcctatcgcattgggcacgccccacaccttttacgactacgacgccaagtacctggcttccgatacccagtaccggatcccgtgcggcctcgacgcagccaaggaacaggaattgatggacctcacggcgaaagcctgtgaggcgctgggtatcgccggttgggcgcgggcagacgtgatgcaggatgaccaagggaatttctggttcctggaagtcaacactgcaccgggcatgaccgaccacagcctggtacctatggccgctcgcgctgcgggcctggacttccagcaactggtgctggcgatcctggctgcaagcattgagccacgaggctaaggacatgaaaggcgcatcgcttcgtcatcagcccccacaagcaccgagccgcaagccggtgccacggggtgccagccgaatggtggctaaagagccgatgtcggcgcgcctgccgaaagccaactttggtttcctcaaggcgttgtactggccggtgttgctggtggtcttgggcttcggaacctacgagggcgcgcagcgtctgttgccgtatgccgaccggccgatcaccaagatcagcgtgcagggcgacttgagctacatcagccagcaagcggtacagcagcgcatcggcccgtacctggcggcgagcttctttaccatcgacctggccggcatgcgctcggagctggaacagatgccgtggatcgcccacgccgaagtccgccgcgtatggccggaccaggtgacgatccgcctggaagagcaactgcccgtggcccgttggggtgacgaagcgctgttgaacaaccagggccaggcgttcaccccgcgtgagctggccaactacgagcacctgccgcagctcttcgggccgcagcgggcgcagcagcaagtgatgcagcagtaccaggccttgagccagatgctgcggccactgggcttctccattgcacgcctggaactgcgtgaacggggcagctggtttttgacgaccggggcaggcagttccggcccgggcatccagttgttgctgggacgcgaccgcttggtggaaaagatgcgccgcttcattgccatctatgacaagaccttgaaagaacagattacgaacattgcgagcgtcgacctgcgttacgccaacggccttgccgtcggctggcgtgaaccggctgcgcccacggcagcgcaacccgctgtcgcgaagaattaagaagaggcaggacccatggcaaacgtgcaaagcggcaaaatgatcgtcggtctcgatatcggcacctccaaggtggtggcgctggtgggcgaggtcggggaagacggcacgatcgaaatcgtcggtattggcacgcatccgtcccggggcctgaagaagggcgtggtggtgaacatcgagtccaccgtgcaatcgatccagcgcgccatcgaagaagcgcagctgatggccggttgccggatccactcggcgttcgtcggcgtggcgggtaaccatatccgcagcctgaactcccacggcatcgtggcgatccgcgaccgcgaagtcagctcggccgacctcgagcgcgtgctcgacgctgcccaggctgtggcgatcccggctgaccagcgcgtgctgcacaccctgccgcaggactacgtgatcgacaaccaggaaggcgtgcgcgagcccctgggcatgtcgggcgtgcgcctggaagccaaggtccacgtggtgacctgcgccgtcaacgccgcacagaacattgaaaaatgcgtgcgccgctgcggcctggaaatcgacgacatcattctcgagcagttggcctcggcctactcggtactgaccgacgacgagaaagagctgggcgtgtgcctggtggatatcggcggcggcaccaccgacatcgcgatcttcaccgagggtgcgatccgtcacaccgccgtgatcccgattgcgggtgaccaggtgaccaacgacatcgccatggcgttgcgcacaccgacccagtacgccgaagaaatcaagatccgctacgcctgcgccctggccaagctggccggtgccggcgagaccatcaaggtgccgagcgtgggcgatcgtccaccgcgcgaactgtcgcgccaggccctggccgaagtggtcgagccacgctacgacgaactgttcaccctgatccaggctgaactgcgccgcagcggctacgaagatttgatcccggccggcatcgtgctgaccggtggtacctcgaaaatggaaggcgcggtcgagctggccgaggagatcttccacatgccggtccgtctgggcgtgccccatggcgtcaaaggcctgggtgacgtggtacgcaacccgatttattccaccggtgtgggcttgctgttgtacgggctgcaaaagcagaccgacggcatttccctgtcgggcccgagcaaccgtgacagctaccgcagcgacgacgaggccaaggcgccgttgttcgagcggttgcaggcatgggtcaaaggcaacttctaacgatttaccgcgacaccgcaacaccgttgtaagcagtaggcgaaaaaactagagaaatgaaaggagagggaacatgttcgaactcgtagacaacatccccgcaagcccggtcatcaaagtgatcggtgtcggcggtggcggcggcaacgctgtcaaccatatggtcaagagcaacattgaaggcgttgaattcatctgcgccaacactgatgcccaggcgctgaaaagcatcggcgcgcggaccatcctgcaattgggcactgcggtaaccaagggccttggcgctggcgccaacccggaagtcggccgtcaagccgcgctggaagaccgcgagcgtatcgctgaagtgctgcaaggcaccaacatggtgttcatcaccaccggcatgggcggcggtactggtaccggtgctgcgccgatcattgccgaagtggccaaggaaatgggcattctgacggttgctgtcgtgacccgtccgttcccgttcgaaggtcgcaagcgcatgcagatcgccgacgaaggcatccgtctgctgtctgaaagcgtcgactcgttgatcaccatccccaacgagaagctgctgaccatcctgggcaaggacgcaagcctgctgtccgctttcgccaaggctgacgatgtactggccggtgccgttcgcggtatctccgacatcatcaagcgcccaggcatgatcaacgtcgactttgccgacgtccgtaccgtgatgagcgaaatgggcatggcgatgatgggcactggctgcgccagcggtccgaaccgtgcacgtgaagccactgaagcggccatccgcaacccgttgctggaagacgtgaacctgcaaggcgcacgcggcatcctggtgaacatcaccgccggtcctgacctgtccctgggtgagtactccgacgtgggtagcatcatcgaagccttcgcttccgagcacgccatggtcaaggtcggtaccgttatcgatccggacatgcgcgacgagctgcacgtgaccgtggttgcgaccggcctgggcgcgaaaatcgagaagcctgtgaaggtcatcgacaacaccctgcacaacagccaaaccagccacgccagccaagcggctgccgctccagcgccttcgcgccaggaactgccgtcggtgaactaccgtgatctggaccgtccgaccgtgatgcgcaaccaggctcaggccggtgctgcggcgtcccgtagcccgaatccgcaagatgacctggactacctggacatcccggcattcctgcgtcgtcaggccgattaatggaatgtatcagggctatgaaggtgattggtgttcagcaaaggtctggtctgctattatcgccagcctttgttgataccagttcgcaatttgcgctgaagcggtccaagccatgattaaacaacgcaccctgaagaatattattcgtgccacaggtgtaggtctgcactccggggagaaggtatacctgaccctcaagcctgcacctgtcgacaccggcatcgtgtttgtgcgtgccgacctggaccctgtggtgcagattcctgctcgcgcggaaaacgttggcgaaaccaccatgtcgaccacattggtcaacggtgacgtcaaagtggacacggtggagcacttgctctcggccatggctggcctgggcatcgataacgcctacgtcgagctctccgcgtccgaagtcccgatcatggatggcagcgctggacccttcgtattcttgattcaatctgccggcctggaagaacaggacgcagctaagaagttcattcgcattctgcgggaagtgacagtagaagacggcgacaagcgcgccaccttcgtcccgttcgaaggctttaaagtgagctttgagatcgatttcgatcacccggtattccgtgaccgcacccaaagtgcaagcgtggatttttccagtacttcgttcgtaaaagaagtcagccgcgcccgtacctttggtttcatgagtgacatcgagtacctgcgcaagcacaacctcgcactcggcggcagcgttgaaaacgccattgtggtcgacgcggatggtgtactgaacgaagacggccttcgctacgaagacgaattcgtgaagcacaagatcctcgatgccatcggtgacctctacctgctgggcaatagcctgataggcgagttcaaaggcttcaagtcgggccacgcccttaacaaccagctgctgcgcaagttgattgagcagacagacgcttgggaagtcgtgaccttcgaagatgccagcaccgcaccgatctcttacatgcgtcccgttgcggcggtgtaagtaacaactctctttctttagttttgaaaggctgccttcgggtggcctttttttatgcgcactttttctgactctgcctcggttcaggggtgggagggggcttgcccccgattgcagcgggtcaggccaggcatttgtcactgatgcaccgccatcgggggcaagccccctcccacattaggtcgggtttattatttagagggttgcggaatcgacaatgcggtttcttccgctgtgcttggcctcatacagcgcctggtccgcactcagcagcaacgcctccagcgactggcgactgcgcttgtcccacgtactcatgccaatactcaccgtaatcggctgctcatcaccctccactcgcggcaagtgctcgacaccgctgcggatatgctcggcgatcaccgaggcacccttggcgtcggtcaccggcagcaccactgcaaactcttcaccgccatagcgtgccgccaagtcggccgggcggcggatgttggtaccgatcacttgggccacgttacgtagtgcctcatcaccgccatgatgaccatgacggtcgttgaacgccttgaagtggtccacatcgatcatcagcaccgtgagcggctcggtcgagcgttgggcgcggtcccactccaggcgcaggcgttcgtccagcacgcggcggttggccaggcccgtcaacgcatcggtggctgccagttctgacagtacccgttcagcgcgccgccgccgtcgcagttcccggcgtagcatccaggtcagccacaacaaaccggcacagagcactccggttgcactactggtcagcagtgccacgcgactccagggcgcgaatacgtcctcgctggacagcgccacgaccacgatcagcggcagttcaccgacattggtaaaggtatacaggcgttctttgccactgatggcagagatcgcctgaaagctgccgcttccgtcacgcagtattcgcttgaagttgggtcggtcactgaggtccttgtcgatcatgtcgcgttcgagcagcggctgctgggccaggagaatgccattcctgctcagcaggttgacgctgctgccgttgccgatggtcagggtgttgaagagctgatcgaaatacgccaggcgcatggtcgcaaccgccacgccggcaaactctcccttggggcccgacacacgtcgactgaatgccatgcgccagacctggtcgcagtcgcaacggaccttgaacggccgactgataaacaagccggcgttggcgtccttggcatgcacctggaaataatcgcggctggcaaaattacgcggcgtgggccgcagcgtggaggagtcggcgataaccgtaccggtggtgtccagcagcaggacctcgcctttgaaaggcgccgccgtggacaaatcaaactgcaccaggtgctggatattggcggcaacctgggacaggtcttcgcgttgcgtggccgcaatcagaccgttgagcgccatgtcatacagttcgacgttacgcagcacgtcggcattgatcaattgggcgatgttggtggtagaccgcttggccgcttcgagcgtgctggcgtgttcgcgcatcaacagcaccgcgacaatgatcacaatcagggcgacgctgagcccgctgcccaggatcagtaacaactcagggtgtgcgggtgaggtacgaacagggcgtggactcatcgggcagacttcagcggtgaggatgctggcagtttagttctaccagatgaaaattaaatacttggttaaaaagaaaaaatcacccctcagaacacgttgatcggatagtcgacgatcacgcggtactcgtccacatcccgatccaccgccgcgtagccattgccaccgcggttggtcgcccattgcaggcgcaccgccaggtccttggccttgccgccctgcaccacgtatttcacgtcgatgtcgcgttcccagtgcttggcatctttgccatcggcgctgtaccaggcgctgtagccacggctttgcggatcaaccttggtcaggtcggtcttgccgctgatgtaggacaccgccgaggtcaggcctggcatgccgaggccgacgaagtcataggcgtacttgagcttccatgagcgttcgttggggccgttgaagtcggagtactgctgggagttgtccaggtagacgctgtcaccttgggcgatgtagtcgaacggcgtgttgccgttgacccgctggtaggtggcggtgacgctgtggttgcccacgcccacggtgaaatgcaggctgtaggtgttgttgtcgatgctgccgagcagcgactggccggtgtcctgggtgtggtagtagtgcaggcccgggttgaggctgaccaggtcattcagcgcataggtgtagtccaggtcgtagtagtactggttccacacatccttgagttcggcggcgtaaaggttgctggtcagcccgtcgatgccgctgaacgacacgccggcccagttcatgtgctggctgtcggcagtgttgggcagcgcgccgtagctggtgccgatgcggcgatggccgctctggttgtagagcttggtgaaactggcctggccgccttcgaacacccagccgtcgaggctgaggttggtcaggctcacgccacggaaggtctgcggcagcatgcgtgtcgcgccgccggcgatcaccgggttattgaggaacagatcgccggctttcagctcggtatcgaacgcgcgcattttcaaggtgccgcctgccgtggagaacgagccgggtgccttgccgttgccactgccatacggaaggatgctggaaccatcggtgccgccaccgccgtcgagcttgaggccgagcatggcatgggcatccaggccgaagccgacggtgccctgggtgtagccggattcgaagatgccgatgaaaccctggccccactctttgctgtcatcggtgtggatgtcgcgccggtcgcggttcatgtagtagttgcgggtgttgatgttgaggtgggcgccttcgacgaaaccgtcggcgggggtggtgtctgccgcgtgggcaagggaggtaatcgttgcggctactgcgaggaataacggggtgaacgtcagcgagttcttcaccggtggagctcctttggtcaatcggaaacagccagtgtcgttgggggtgcctggccttttttgacggcaaaaaaaagccgctgaaggtcagcggctttaagacagattcccagtgtagagccctggaaataagtcgagggaaattcgggtaagcgggaaagctgtctttgccgtcgcgctcatcgatgcgtcaaattaacgcaggcgagcggtgcggtacagagtgtaacaagataatgactgttgcccaaatcgcaacagtgatggtgtgaagggcaatgtgggagggggcttgcccccgatggcagtgtgtcagccagttcatgggtaactgacgctccgctatcgggggcaagccccctcccacaggttggctgccgtgttctcaggagattcagaggggcagggtaataccgaaggtattgccaccgccgtcgctgcgtacgaacacatccccgccatgcatcaacgcaatcgccttgacgatcgccagccccagcccgtgattcgcaccgctgttgctgcgcgacgcgtctacccgatagaagcgttcgaacaggcgcggcaggtgctcgctggcaatcgcatcgccggggttggtcacaccgatagagacctgatgcgcctgcacctcgatgttcacggcgatgacctggccgggcgcggtgtgctgcaccgcattgctcagcaggttgatcagcgcgcggcgcaggtgggccttctcgatctgcaccagggcgtcaccgtggacctgcacctggacctgggcgtcttcgaggatgaagtccaggtagtccagggtcgtggccacttcgtcggccagggagctttcgatcagcttggtggctttgctgccctggtcggcgctggcgaggaacagcatgtcgttgatgatcgaacgcaggcgctccagctcttcgaggttcgattgcagtacctcgaaataatgctcggccgagcgccctcgggtcagcgccacctgggtctggccgatcaggttggtcagcggcgagcgcagttcatgggccacatcggcgttgaacgactccaggcgcgaataggcttgctcgacgcggtcgagggtggagttgaacgaattgacgaactggctcaactcggggggcaacggcgacagctgcaggcgcccggagagcttcggcggcgcgagtttctgcgcttcgtccgagagtttgcccagcggtttgaggccgatgcgcgccacccagaaccccagcaacgatgccagcaccacgcctaccagagccaggctgatcaacgccaccagcaggtgatgctgggtggcgcggaagttctcggtgtcgatggcgatcatgaagcgcagcggcgggcgttgatccttggccgggaactggctcaccagtaccttgaacgggtgtttgtcgccggccaggcgcaagtcgcgcttacctgtgcgtccttcggcgaaggcgcggatctgcgcatctgggttgccgtactcgtagttcgggtcgctgctcacgacccagaagcggatgcgtttgtcttcctcgctcagcaacttgagcttggcctgtatctttacccaatggtccggtgtaccgaagcgattcaccgacgattcgagcacgctgtagcgcgcctccagttcggcgcccggcagcaggccaaggctgcggtccacctgttgatagagcgcgccgccaatcaacaggaagatcagtgccgccaccagggtgaacatgctgctcaggcgcaaggcaatcgagttagccgacactgcgactctccaacacatagcccatgccgcggatagtgtgcagcagcttggtgtcgaacggcccgtcgagcttggcgcgcaggcgcttgatcgcgacttccaccacattggcatcgctgtcgaaattgatgtcccagaccatttctgcaatcgctgtcttggagaggatttcgccctggcgccgtgccaatacgctgagcagcgagaactccttcgcagtcaggtccagacgctggccgttgcggctggccttgcggctgatcaggtcgatccacaggtcggcgaccgtgacttgcaccggctcgtgcccgccactgcggcgggtcagggcttgcaggcgcgccaccagttccaggaacgaaaacggcttgcccaggtaatcgtcggcgccttcgcgcaggccgcgaatacggtcttccacgcgctcacgggcggtcaacatgatcaccggtgtctgcttgcgcgcacgcagcgcacgcaacacgccgaagccgtcgaggccgggcagcatcacgtcgagcacgatcaccgcgtagtcgttctccagcgccaggtgcaggccttcgacaccttcgcgggcgacatcgaccgtatagccttgctcggtcagaccgcgatgcaggtagtccgcggttttttcttcatcttcaataatcaggacacgcatgagtcttttgctccagggccgggcctcagtgtgtgctcgccagcgcaggcgttggtttgggccggtggaaaaacttctcgaggtacaagtatatgaccggtgtggtgaacagcgtcagcgcctggctcaccagcaagccgccgaccaccgcgatccccagcggctggcgcatctccgcaccggggccggcgccaagcatcagcggcaccgcgccgagcagggcggcgagggtggtcatgatgatcggccggaaccgtgtaacgcaggcttcatagatcgcatcttccggcgacaggcccctgacacgctgagcctccagggcaaagtcgatcatcaggatgccgttcttcttcacgatgccgatcaacagcaccaggccgatcaaggccatgatcgaaaagtcctggcccatcagtgacagcatgatcagcgcgcccaaccccgctgacggcaaggtggagatgatcgtcaacgggtgcacgaaactctcgtacagcacgccgagaataatgtagaccgccaccagtgccgccaggatcagccacggctggctggccaacgaactctggaatgcctgggccgcaccctggaagttaccgatgatggtggtcggcatgccgatttcattcttggcctggttgagcatgatcactgcatcgcccaaggccacccccggcgccaggttgaatgacaggttggcggccgggaacatgccgtcgtggctgatcgaaagcggccccactgtgggcgggtcaaccttggccagcgccgacagcggcaccatctcattggtcagcggcgagcgcaggtaaaagtagttgaggctttcggccttgccgcgttgctgggtgtccagttccagcaccacttggtactggttgatctcggtctggaactcgttgatctggcgttggccgaaagcatcgtacagcgcctgatccacatcggtggcggtcaggccgaagcgtccggcggcctggcggtcgatgctgatgtgggtgatgctgccgcccagttgcaggtcgttggacaggtcgcgaaaggccgggttggcgcgcagtttttcggtgaggcgctgggtccaggtattcagcgtcgggccgtcattgctcttgagcacgtactggtactgggcgcggctggggccggaactcaagttgatgtcctggccggcacgcagatacagcacgatgcccggcaccttggcgagtttcggccgaatgcggtcgatgaactggctggcggacacatcgcgatcaccccggtctttcaaggcgatccagaaacggccgttggcgatggtctggttgctgccggtcacgcctaccgagtgcgaaaacgcttgcaccgccgggtcggccttgacgatctcggccagggccttgtgcttggcgaccatgtccgggtacgacacgtcggccgccgcttcgctggtgccgagtacaaagccggtgtcctgcaccgggaagaagcccttggggataaacacatagccgaccacggccagggccagggtcaccacgaagatcgccgccatactgcgttgatgggccagggcgcggcgcaggttgcgtgcgtagccggccaacagacgctcgctgaaacctggtttgtcgtgggcgtgatgggtgggcgctcgcatgaacagcgctgcgagtgtcggcgccagggttagcgataccaccaccgaaatcaggatggtcgaggtggctgtcagcgcgaattccttgaacagccgcccgaccacgccgcccatgaacagcagcggaatgaatgccgccaccagcgagaagctgatggacaccacggtaaagccgatttcaccggcgcccttgatcgccgcttcgcgcttgtcgaggcccgcctccagatgacggtgaatgttctccaccaccacgatcgcatcgtccaccacaaagcccacggcaatcacgattgccaccagcgtgaggttgttcaggctgaagcccatcaggtacatcagcgcaaaactggcgaccagcgacacgccgagcacactggacacaatcatcgtcgccgataattggcgcaagaacagcgccatcaccgccaccaccagcaggatggcaatcagcagggtcacttccacttcgtgcagggaggcgcggatggtcttggtgcggtcggtcaacacgctgacctgcaccgacgccggcagcatggcttgcaggcgcggcagctcggcttgaatacggtcgacggtctcgacgatgttcgcgccgggttggcgcgagatcaccaggttgaccccgggcgtgtcgccggaccaggcctgcacgtaggcgttttccgaaccgttgatgaccttggcgatatcgcgcagttgtaccggtgcgccgtccttgtaggacacgatcaattgcgcgtagtcctccgggtggaacaactggtcgttggtcgacaaggtcgacacgctgttctggccgtagatcgcgcccttggccaggttgaggctcgattgctggatggccaggcggatatcggcgagggtcaggccgatggcggcgagtttgtccggggacgcttgcacgcggatcgccgggcgttgctggccggtgatgttgatctggccaacgccgtcgatctggctgatctgccgggccagcagggtttccacgtagtcgctcagttcggtgctgggcatgctgttggaactgacgctgaggatcagtaccgggctgtccgccgggttgacctttttccaggtcggcaggctcggcatatcgctgggcagcttgccggacgcggtgttgatcgcggcctgcacttcctgggcggcggtgtcgatgctcttgttcagggtgaactgcagggtcagcaggctggagcccaaggcactgctggaggtcatctgggtcatgccgggaatggcgctgaactgcacctccaaaggcgtggccacggacgaggccatggtgtccgggctggcgccgggcagggtggcggtgacctggatcgtcggaaactccgcttccggcagtggggcgatggccaggcgcgggaaggcaatcagcccaagcagcaccagggcgaaggtcagcagcagggtggcgaccgggtggtcgacgcaccaggctgatggcgaacggctcatggccgcaccttggcatcgacggtctggatgacctgcggcggttccttgagcacctccacctgcgccccggccttgagccgcgactggccgtcactgaccagcacatccccggcctgcacgcccttgatgatgttgaggtcgctgtcctggtacgtcacctgcaccggcaccacctcgaccttgtcaccgttgacccggtacacgaagtgcgaatccaggccgcgctgcaccacggtcggcggcaccaccagcgcgtttttgtcgagggcggtctggatcttgatggtcaccagttgccccggccacaggcgttgtgaggcgttgttgaattcggccttggcgcgcagggtgccggtggtggagctgatctggttgtcgatcaggctcaagtggccttcgccgagcaagtcgccggtctggccgtcggtatcggcgcccaggtaggcgtcgacactggcctgggtgggtgctgcgatcaggccttgcagggtgggcagcatctgttgcggcagggaaaactcgacggcaatcgggtcgatctgggtcacggaaaacaggccctgggtatcggctgtgcgcaggaagttgccttcatccacggtgcgaatacccacgcggccgctgaccggtgagcgaatctgggtgtaggaaagttgcacttgcgccgaatcgatggcggcctggttgccctgggcggtggccttgagctggttgaccagggcttgctgctggtcataggtctgcttggacacgccgtcgtcgacgctcaatgccttgtagcgcttgaggttgaccagcgccacctgcaactgcgcctggctttcgcccagttgcgccctggcctggtcgaggctggcgcggatcgagcggtcatcgatggtcgccagcaggtcgccggccttgacccgttggccttccttgaccagcaatttagtgaggatgccgtccacttgcggacgaatcaccacactgtgcagtgacagcaccgaaccgatcccgctgacaaaacgcggaacatcctgctgcgccacgctcaccacccgcaccggaatcgccgtgggcgccgccagtttggctttggctggacgggtcaaggcccaggctgcaacggccaacactacgaggacacccacgatcagggcggttttgcgttgaatgtgcatggggtgaggcgccagggcaaaggattggaagtgtgtgaggcctttatagcctgccaacccggtcagcaaggtgactgctaactgacggcgctgtcagtaaaggcagaccattcgtacaggtggtggttaaagatccgaggcgggcaggtatactgcgcgccagcgtggcccgcaagccggccccgcgtcatttcttgcacgctccggagcttccatgacttccccgacacaaacccctgttgaagcggccgacctcgtcgatccggccagcgccgaaggcgttgaaaaagccgagatcccggcgttcaaattccccttcaagccgggtgagctggccggggccaagaatgccgcccagccctggtacaagaacggcgccaagaacggtcacaccaagaccccaggcatggcgccaccgggtactcgccgttccatgggtaaacgttaagattaacccgctgtaatatttgcgggatgttgcctacaacgccagtcgctatttcgtcttgtaggcccgcgaccgtttcttgaaagcttgcacagcttccgctgcccccctggtttttccacagggcgcagcggagggcgctctttccggaaaaggacgtttcctgtggccctgatacacctctgtgtagcgtttgccctgttgctggcggtggatgccgttgcaggccttgatcaaccgcgacgcgaaatccgcttcgccgttgccgcgcaatttccgcccttccagagccgcaacccgcaagggcagttggtcggcttgaatatcgagttgggcaacgccctttgccagcagttgaatgtgcgctgtacttgggtcgaccaggtgctggtcgaagacttcgaacgtcttgaagcgcggcaattcgatgcaatcatgggtattgcccctacaccactacgccggcgctgggtcagtttcaccgacaacctctaccccttcaccacacgcctggtcgcacgtcgaacctcgggcctgatgccgctaccaaggtcgctcaagggcaagcgagtgggcgtattgctgggcagtaatcgagaagcctttgttcgttcgcaatgggcgcgcaaaggcgtgattatcaagagtttctggctcaacgacgaactggtccgcagcctggtggcaggcgatatcgatgcgaccctgcagggcactgtggaaattcgcgaggccctgctcgacacggctgccggccaggacttcgacttcctgggccccgccgtttgtgctgagctgttgggcaatggtgttgcgattgcgctgcgcaataccgacacggcgctgcgtgtcgagcttaaccgtgcgcttgagcagctcaagcacaatggcgagtaccagcggatcgtcgcgccttatcggctggacgtgccgtgatggctaattaattgcgcagaacatgagctggatcagtatttgccccctcggtgcgcttagagtcgacgccctgccgactcccctaacaatcacgagcgcgcttctccatgaagatcaatctgccggtcaccggtcggaatgtggactttgcccccgacgccaacatcctttcgaccaccgacctgaccagcgcgattacctacgccaaccaggacttcatcgacatcagcggctacagccgcgacgagttgctgggggcgccgcacaacatcctgcggcatccggacatgccagccgaggcgttcgcccatatgtggcaaaccctcaagagcggccggtcgtggatgggcatggtgaaaaaccgctgcaaaaacggtgaccactattgggtcagcgcgtatgccacaccggtgacccgagagggcgcgaccgtggagtatcaatcggtgcgtaccaagccggatgcgcacaggatcgcagtggcggagcggatgtatgcgcgcttgcgagcgggtaagcggctgtcctggccggtcgtcggcatgggggtgaaattgtcggcatgggtcatcgccacttgcgcggtgacctgggccttgggcttgagcctgacgggctacgcgctggtctggcagttactggcgttggtggcggggtgtgcggtgggggcggctggcgtgcggctgatgttgcggcccttggctgaactgcaacggcgggcgcgctgggtggccgacaacccactgagccaggcgatctacaccgggcgcggtgatgagtgtgggcagatcgagttcgccctgcacatgctcgaagcccaagcgggcgcggtggtcgggcgtattggtgatgccgcccagcgcctctccggccacgccgcacggttggtgcagcaccttgacagcagtcacgccagcagcctgggccagcagacccagaccgaccaggtggcggcagccattcaccagatggccgccagcgtggccgaaatggccaaccatgcccagcaggcgtccagggcggccgagcaggccggcagcgaaacccgtgaaggccacctgcgtgtggatgaaagtcgtgatgcggtgttgcgcttgtcccaggagctggcgcgggccacgcaggtgatccaccagttggaaaaccacagcggtgaaatcagcagcgtgctggaagtgatccgtacgattgccgagcagaccaacctgctggccctgaacgcggctatcgaagcggcgcgggccggtgagcaagggcgcgggtttgcggtggtggccgatgaagtgcgtggcctggcccagcgcacccagcaatcgaccgacgaaatccagcgcatgatcagtaccctgcaaggcggcgcacgggacgcggtgcaggcgatggcccacagtggcgagcatgtccaagccagtgtcaaacaagcccagcaggccgccgccgcactggatggcatcagccagcgcgtcatgcaaatcaccgccatgagccagcagattgcaaccgccgtggaagagcagagcacggtgagcgaggacatcaatcgcaacatcgtcggcatccgtgatgccggcgaggccaccgtcagtgccgggcagcagagccggctcagttcaagcgacgtggccggactggcggaggatctgcgccagctggcgcgtgagttctggtctaggccgcgcgcaacgagataaacgcgtagttggccggcacctcggtggcaatctgcgccccggcatccagcacttgctcggcgatgtccatccccgagacatggaacacccactcgttggccacggacggctgacccatcgccaactcgattgcttgggcaaacgcgcccatgtccggcaggtaagcggtaaacccatcccccttgagtgctgtggtgcgaatgccgagcaaggcgcacaccgcttccttggtctgcacatcatcacggtcggcctggcgtgagcgctggatcaactgcgtcagttccgggtccatcaactggccgcccacgatcagctccggcccctgctcccaggactccggcgggcaatccttggcggcggggttcaatgggatatgcgggttgatctccatcgggtagatgcggcacaccagcgggcggcgctcatagatacggcagcggttgtcctcgtcaagattccggcaggggccggcgttgtaggcggcaaaggtgattgccacaaacgcctcggtgttgccgctgggcacgaccaccgaacggcgttcggcatgttcgcgttgttgtgggggcaggcccaggccattgcccaggaaaccttccaccaggacgatgacgctgccgccgtcggccgcccactggcgggcttcttcgagggtcagggggacgtgatgatcggagcagcatttgccgcaacctacgcaggaaaattgagtgttcatggcagatctgtcaccaggctaggtcagagggcacgcaagaacggtgacgggtttttacctctgttcaccgttttgtctctctggaagcaagttacacgccagtgcctgtcagtcctctgtcactacgtcgcgtaggacaaatctcatgcctgcgctctcatacagctgccgagcgcgcaggttgctttccaataccttgaggtccacatagggctcgccgcgttgcttgaaggtatggaagctgtgcagcaacaacgcgcggcccaagccctggccttgggcgcaagggtgaacggagaggtgcttgatgaacgcgctggtccagcattgcgcgacggcgagaataccgtcgtggttgctcgccaccaggcaaagcgtggggtcgaactcggcgtcggtggtgaattgttgttgccaggtttccaggtgggggacgcggccgccgccctggtcctgggtcatgcgcaacaccgcatgaatcgcgggtgcaagctcgtcacggtaatgatccaactgtgtacccgccggccacagcggggcgggcaggctgccggtgaggtcgcggcgcagcagttggaagtattcgctcacaggcctttttgcgccacgctttgagcggccaccaccaggcacttggtcaactcgggagaagagaactttgtgagcaccgcgtcggcgccggccagccgggctttttcgctgttcatcgcgctgtccagggaggtgtgcagcaagatatacaggtgctggaaatcaggggtttcgcgcagggtgcgggtgagggcgtagccgtccatttccgacatctcgatgtccgacaccaccacattgatctgctccgccgtgccttgcagctccagcagcacatcgatggcttccttggcgctgcgcgcggtgtggcaagtgaggccgaggttgcgcagggtgtgtaccgattgctgcagcgcgacctggctgtcgtccaccaccaggatgcgcgcattgcccagcacttcggcttcttccatggtcaggtcggtgggcgcggcttcaatcggcgccggggcgatgccgtggatgactttttcgatatccagcacctgcaccaggccgccttccacctgggtcaccccggtgataaacgcacggttaccgccggagccgtagggcggtgggcggatgtcggtggtcaggcaatgcacgatcttgctcaccgcttgcacatgcaggccctgcttggagcggctcacatcggtaacgatcaggcagccgccgtccgggtctgccaggggcatttcgccgagggcgcggctcaggtcgatcaccgccagcgaatttccgcgcagggtggcgatgcctttcacatgcgggtgggactccggcagcttggtcagcggcgggcatgggatgatttcgctgactttcagcaggttgatcgccatcagcttgccgctgcgcaaggtaaagagcagaagcgagagtgagtctgcgcgggctttggtggtggacataaaaaccttctgtggatcagggatgacgaacatctatggaaggttatcgacttgagtgagccaggctttaaccggatttcgtgccggacggaagtcgatgtgggagggggcccctcccacattaatgttcggtcagtgtttccagacttgcgggttcaccaggtcctgcgggcgctggcccagcagggcgctgcgcaagttgtccagggcgcggttggccatggcttcgcgggtttcatgggtggccgagccaatgtgcggcagggtcaccgcattgttcagttggaacagtggcgattcggccagtggctcctgttcatacacatccagcccggcgccacggatacgctggctttgcagggcttcgatcagcgccggttcgtctaccaccgggccgcgggaaatattgatcaggattgcgctggacttcatcagccccagctcgcgggtgctgatcaggtgccgggtcttctcactcaatggcaccaccaggcacacgaaatccgcctcggccagtagcgcgtccaggctgcgaaactgtgcgcccaactcctgctccagcgccggcttgcggctgttgccgctgtacaggatcggcatgttgaaacccaggcgtccacgccgagccacggccgcgccgatattgcccatgccgacgatgcccagggtcttgccgtgcacatcgcaaccgaacaacggcgcgccgacgctggctttccactggccggccttggtccaggcgtccagctcggccacccggcgagcgctgctcatcagcagagcgaaggccaggtcggcggtgctttcggtgagtacatccggggtgttggtgagcatgatcccgcgttcgttgaagtacgccacgtcgtagttgtcgtagcccaccgacacgctggacaccacctccagcttgcttgcgccctgcaactgctcgcggcccagcttgcggccaacgccgatcaggccgtgggcgtggggcagggcttcattgaattgagcattgatgtcgcccagcttggggttgggcgcgatcacttcgaaatcctgttgcaggcgttcgatcattgccggggtgacgcggctgaaggcgaggacagtctttttcattgcaggcgggctcatcgactacggaggaatgccaagcacgctaacattccttgccactgttgtcaggggacggcagacctaaagtgggcagagaaaaatgtgggagggggcttgcccccgatggcagtgtatcggccaacacatctggtgactgacgcaccgctatcgggggcaagccccctcccacatttaatctgtatcacctgggagagatcagttcgccaggcgagcaccgctgaggctgccactcaattcatacgccaccagttccgcctgatgcgccgccagaatctccggcaacgagccgcgcaggtattccacccaggtcttgattttcgcatccaggtactggcgcgaggggtagatggcgtacaggttcaattcctgggaacggtagttgggcatgacccgcaccagggtgccgttacgcaggccctcgatggccgcgtacaccggcagcaggccgacacccatgccgctggtgatcgcggttttcatcgcatccgccgagttcaccaggaacggcgaggtgttgatcgccacgctttcctggccttcggggccgttgaaggtccacttgtccagctgaatcaccgggctgaccaggcgcaggcaggcgtggttaagcaaatcctgtgggcgctgtgcgcaacctttggtcttgacgtaatccggcgaggcacaggcgatgctgtaggtgatgcccaggcgctgggacacgaagcccgagtccggcagttcgctggccagcacgatggacacgtcatagccttcgtcgagcaggtccggcacgcggttggccagggtcaggtcgaaggtcacgtccgggtgagtacggcgatagcgagcgatggcgtcgatgacgaaatgctggccgatgccggtcatggtgtgcactttcaactgcccggcgggacgggcgtgggcgtcactggcctcggcttcggcttcttcgacataggccaggatctgttcacagcgcagcaggtagcgtttacctgcctcggtcagtgcaatgcgccgggtggtgcggttgagcaagcgggtttgcagatgggcctcaaggttggagaccgcgcgcgacacattggcagtggtggtatccagttgcacggcggcggcggtgaagctgccggcctcggccacgcaactgaaggcgcgcatgttttgcaaagtgtccatggagtgttctcaggggagataacaaattgtgacagaaagttacgccgtccagtgatccctaccaacggattatcgcctgaacggtaacaaagattcacaggaataccagcttatcgtccttcatatcgccccctagaattgcgccacctaccccgcaccaccacctcaggaagtcgcttgccgtgccgcgtcgcatcagcagagagctgaagactctcagtgtttgggccttatcgttagcaatcagcggctgcatcggaaccggaggaatcgccccacaaggccagtccctgaacgccaataacctggccaccgacgacgccatccagagcgccgcacaagacgcccactggcccaccgcacactggtggcaagccttcggcgatccccaactgaaccgctgggtcgacctcgcgacccaacacagcccaagcatggccatggccgccgcgcgggtgcgtgaagcacgggccatggccggggttgccgagtcggccgagtcgttgcagatcaatagtgacaccaccctcaagcgccacaactggccgaaggatcagttctacgggccaggtgagctgagcggtgccaacacctgggacaataatgcgtccctgggcctgagctacgccctcgacctgtggggccgtgaaagcaatgccaccgagcgtgccgttgacctggcccacatgagcgccgccgaggcacgccaggcccagcttgaattgcagaacaacgtggtgcgcgcctatatccagctgtcgttgcagtacgccaaccgcgatatcgttgcggcgacgctggcgcaacagcagcagattctcgacctggccaacaaacgcctggacgcgggcatcggcacccacttcgatgtgagccaggccgaaaccccgttgccggaaacccatcgtcaactggatgccttggacgaagaaatcgccctgagccgtaaccagttggcggcgttggcgggtaaaggtccgggagacgctgcgcagttgcagcgcccgagcctgtccctcgccgcgcccttgaagttgccatcgagcctgcctgcgcaattgctcggccagcgcccggatgtggttgccagccgctggcaggtcgcagcccaggcccgtggcatcgacgtggcccacgccgggttctatcccaacgtggacctggtcggcagcctcggctacatggccaccggcggcggcatgctggagttcctggcgggcaagaaattcaactacaacgtcggtccggcgatcaccttgccgatcttcgacggagggcgcctgcgtgcgcaattgggtgaagccagcgccggttatgacatcgcggtcgccaggtacaaccagacgctggtcaacgcgctcaagggcatcagcgaccagttgatccgtcgcgagtccatggacaagcaagcgtccttcgccgcgcagtcggtggcctcggcgcagaaaacctacgacatcgcgatgatcgcctaccagcgcggcctcactgactacctcaatgtgctgaatgcgcagacgttgctgttccgccagcagcaggtgcagcaacaggtgcaggccgcccgcctgagcgcccacgcggaattggtcaccgccctgggcggtggcctcggtgccggcagcgacgtaccgcaagacgccaagaccctcccgagcaagaccccgacggcactggccgtatttgatcactgagtaggatttgatgactcccttgcctgcaccgctgcgctggctgcatgcccttgagtggcgccgtggttttttcgactgggcacgcagcgacggcgtgacctgggtgtatatcttcaaggtgctggccgccgcattcctcacgctgtggttggccatgcgcctggaattgccgcaaccgcgcacggcgatgatcactgtgtttatcgtgatgcaaccgcaaagcggccaggtatttgccaagagcttctatcgcttcctcggcaccctggcagggtcggcggtgatggtgctgttgatcgccttgtttgcgcagaacaccgagttgttcctcggcgcgctggcgatctgggtcggcatttgcaccgccggtgcgacgcgcaaccgtaactttcgggcctacggttttgtgctggccggctacacggcggcgatggtcggcctgccggccctggcgcatccggaaggggcctttatggcggcggtgtggcgggtgctggaaatctccctggggatcctgtgcgccacgctggtcagcgccgcgatcctgccgcaaacctccagcgccgcgatgcgcaacgccttgtaccagcgctttggcgtgttcgcgctgttcgtcaccgatggcctgcgcgggcgcagccaacgtgaagggttcgaggccagcaatgtacgtttcatcgccgaagccgtgggcctggaagggctgcgcagcgtcacagtgtttgaagacccgcacatgcggcggcgcaatggtcggctcagtcgcctcaacagcgagttcatgagcctcaccacgcgcttcaatgccttgcaccagttgcttgagcggctgcgcaccgatgccgccgaccacgttgtcgccgcgatcaaacccggcctgcaggacctggctgaagtgctcgatggtttctcgggtcgagcgctcaccagtcccgacgcggcgcgcctggtcaatcaactgagcgcctacaaggacggcttgcccacaaaagtgcgcagcctgcgcgcaacgttccaggaaggcgaccccaccgaagccgagcaactggatttccacaccgcctacgagctgctctaccgcttcgtcgacgacctgcacaactatgcgcaaacccacgcgtcgttggccgatcacagccatgcgcgtgagcagtgggacgaaacctttatcccgaagaccaactggctggcctgcgctgcgtcggggattcgcgcgtcgtttatcttgattgtgctcggcagctattgggtggccaccgcgtggcccagcggcgcgaccatgactttgattgccgccgccaccgtgggcctgtccgccgccacgccaaaccccaaacgcatggcgttccagatggcctgcggcaccttgatcggtgcgttggtgggctttgtcgaaatgttctttgtgttcccctggatcgacggcttcccgctgctgtgcgtgatgcttgcgccggtgatcatcttcggcgcgtttctcgcctcgcgcccgcagtacgcgggtgtcggcgtgggcctgttgatctttttcagtaccggctcggtgccggacaacctcacgatctacaacccctacacctttatcaacgactacatcgccatgatcatcggcatgctggtgtgcgcggcggccggtgcgatcatcctgccgcccaacagccgctggttgtggcgccgcctggagcaggacctgcgtgaacaggtggtgtatgcgatcagcggcaagctcaagggcctggcttcgagcttcgaaagccgcacccgcgacctgctgcaccaggcctacggcctcgccgtcggccagccgcaagtgcaacgcgacctgctgcgctggatgttcgtggtgctggaagtcggccacgcgatcatcgagttgcgcaaggagcaggcgatcctgccggtgcacccggcgtacgccgagtcccagccgtggcgccaggcgatccgcgtgatgggccgctcgctggtgcggctgttcctgcaacccagcgcgagcaacctggagcgtggcctgattgccgtcgaccatgcgatcagccgcgtgcaggccaccgacgaacccttcgccccgcacttcgacacctcggccctgcgccgggtgaaaagctacctgcactttatccgcacctcgttgctcgacccgcaatcgccactcgctgcctttaaaggagctgcgcatgccccgtgaaatcgccttccacggcatctatatgccgaccatgaccctgatgtttctgatcgcggcggggctggcctggggtgtggaccgcttcctggccgggttcgacctgtaccgttttttctggcacccggcgttgctgcgcctgagcctgttcgtctgcctgttcggcgccctggcgctgaccgtctaccgttgagaatgccccgatgaaaaagtttttcagcctgctcgcgaccttgctggtactggccctggcgatctggattggccgcacgctgtgggtgcattacatggaaactccatggacccgcgacggccgtgtgcgcgccgacatcatcaacgttgccgccgacgtcaccggcgaagtggtcgacgtgccggtgcgtgacaatcagttggtgaagaagggtgacctgctgatgcagatcgaccccgagcactaccgcattgccgtcaagcaggcgcaatccctggtcgcgtcgcgcaaagccacctgggaaatgcgcaaggtcaacgcccatcgccgggcggacctggatgcgctggtgatttcgaaggaaaaccgtgacgacgccagtaacatcgccgactcagcattggccgattaccagcacgcgcaggcgcaacttgaggccgctgagctgaatctgaaacgtacccaagtgctggcggcggtggatggctacgtcaccaacctcaatgtgcaccgtggtgactacgcacgtattggcgaagccaagatggccgtggtggatatgaattcgttctgggtctatggcttcttcgaggaaaccaaattgccccaggtgaaagtcggcgacaaagccgatatgcagttgatgagcggcgagacgttaaagggccatgtagaaagcatctcgcgcggcatctacgaccgcgacaaccccgagagccgcgagctgattgccgatgtgaacccgaccttcaactgggtacgcctggcccagcgggtgccggtgcggattcatatcgatgaagtgccgcagggggtgttgttggcggcggggattacttgcacggtgatcgtcgataaggcccgttagccgagaaacccgcgaatcacaccgacgccttctggagtgatcccgagggtgtttgccgccacaatgattctttggtcgcctcgctcggtcaacagtacaggatccgtcaccacgggggactgcatgtcggtatagccctttctgtcgaagatcaggtccagggtgccatttgctttgaagcgggccacatagatccaaccaccccgagaagcggtcacgatgttcccggcgttggtggacatcacgcactgccagccattgtcacgtttgttatcgaattgactccgtagaagctgaccattgttgaatagaagatgtggcgcgccgccgggcgtaatggcccgcaggaggccctgcgtggttcccgcgccgatcactccaacctggcccgcagccacgatgctgttgtctgcgcgttctacaagggcattgaaggtcgtgtgctcgccgctgatgccaacggtgtgatagccaggtgtttgagggagaccaaaggtagtgtcgagtgtaccgtcatggttgagccgtgcgacaaaggcggtatcggtagcagggtcaaaacgggcatgaccgacaataacaattttatggcggttgccctggctgatacaggcgttgaccgcagtagccgcgttggcgacgggcaatttgaagtccagccttccattgccgttgaggctggggtccagctgcccatttggctgcaagcggaacaccgtcccgttcgtcatcgtcggcgctgcacgctgtgcgtagttggcagtgaccaggatgctcccgtcgtgttgcaggtatacggttgccgagtcttcagtcagcccttcactttggtgggtcagcaggatgcacacacccgcgttggcaaactgagggtcgagtgtgccttggctgtcgaaacgagcgatgaccaagtctgcccatggcgtgtcttgatcgcgccatgtccaacccagcatcaggatttttccatcgggctgaactgccagccttgagcctccggcctgtgtcaggggcaagaacatgcctgacaccaagccattgttaccccatgagtcatccaggctgccatctgtcttcaggcaacccaacccgaatacgtagttgccattgtgaaagaggttggcgctgaacaggaccttgccgtccaaggtggtcgtcagccctttgaaatgatgggtgacgatgaagtcgggatgttttttgagtatccactccagcgcggccacaccattgttaccgaaattggggtctgggctaccgggttgttgcgaagaggcgcttgggaggttcattggcgtgtcgctccatctgctgtcagaaaggaccggcctcagtctgttggtgaatgaatgcctcgtctactgtcagatctgacaggtggccggggctattgcaggttgccaggtgtttgcgccaacaacgtctcatgcaggtggcgccacaaaagcacaccactggcctgcttctcgaacaccacggttgcgcggcgatccgtctgcgtgccgctggcgtccacttgatgctcgcggtaagtcaccgttgccccacgggcatgccggtcgatcccggccatctcgctcaaggtgatcttcaacccagggcgcatgccgcctaaacgcgtgaacagtgcattgaccccggctgcattcacccttgcgccggtagcgggggcgatcatgctgaacgccggcgagaagcgggcgagcaacgtctgcaaggtgccttcgggtgcgacaccggcaaaccattgctcgatctcgacgtgggtctggatcacttcttcaaaaaaatcgctgtagtcgatcatttacaaactcccattcaaaccaaaacgtttcttcaacaccttctccaacaaccccttgggcaacaacgccgccagcagcggcaacgcgcggctgccgttacccgaacgcagcaggcgcggcggttgcgactgttgcacggccttgagcacatccgcggcaaactcattggcgggtgtcggcttgtcctgggacgcctggctgcgtgcgcggatgccgtcgcgcaatggccaccaaggggattgctcgttgatcaacagttcggcctggacaccggcgttttttgcgaagcttgtattgatcgcacccggctgcacttccatgacccgcacgccaaacggcgcgagttccatgcgcagggcatcgctcaaggcatgtacggctgcttttgatgcgcagtaggcaccggcaaatggcgtgaccaatacgccggaaacactgccaatgttcaccaccaggcctttgttgcggcgcaggggcgggaacagcgcctgggtcacaccgacgatagaaaatacattggtctcgaactggcgttgcatggcctcggtgccgccatcgagcaacgggcccatggcgccatatccggcgttgttgaccagcacatccagatcgcccagctgttcggccaggtgttgcagggcggtgctgtcgttgacgtccagctcgaccgcattgaagcccgcagcggcaagggcggcgacatcttccgggcggcgggcgctggcccacacgctgtagccggcggctttgaacgcgtcagccagggcacggccaataccactggaacagccggtgatgagtacgttgggcatgggtcagtcctttgtcagtccgagaaactgccttgcaggtgctcggcacgaaattccagggtttgcgggcgatagccggggcgcaacggcggcgtgggcaggcagtcttcccaggtcgccccggcctgcaactccccagggccgcgatagcggggggcggcgtagacgttgtcggccaggttgaccgagtcgcccggtgcataggcggcgacgcgccagcgcagttcggtcagcggtacatcgttgccgttgttgagggtcaacttgagcgggcggtcggccgggcactcttgcggggcgtagctgatgcgcagttccaggcgtgccagttgcgaggcttcgcggttgtccagccataccacccagattgctacgaagcccaggcccacggcggcggcgagggagacgggcaaggccttggcggggtagcgcagcagcaggatcagccaggtgatgatcaggagaacgccgaagaacatggagaccacctcgaatagggaacgagcatcctaacttaagcgtaggtgggattggcgaccttgagtgctgtggtgactgtgagagcctcatcgggggcaagccccctcccacccttgatctgtgaacacattcaactgtgggagggggcttgcccccgatgaggcccttgcagttaccccaaaagcccaaacaaaaagcccccacccaacccactgcggataggggacgcaatgggctgggcgagggcttcttgtacgactgttttactgcgcgatagttttcaccgacacgccacgttcaaccggtgtggagcgaccgtagatatcttcgaagcgctcgatatcgtcttcgcccaggtagctgcccgattgcacttcgatgatctccaacgggatcttgcccgggttgcgcaggcggtgcaccgaggcgatcgggatgtaggtggactggttctcggtgagcaggaacacgttctcgtcacaggtcacttcggcagtgccgctgaccacgatccagtgttcggcgcggtggtggtgcatctgcagcgacaggcatgcgcccggcttgaccgagatgtgcttgacctggaagcgcccgcccatgtccaccgagtcgtaggagccccacggacgatagacttcgcagtggttctgggtttcgctgcggccctggtcgttgagggtgctgaccatctgcttgacgccctggaccttgtccttgtgggcaatcatcatcgcgtccttggtttccaccaccacgatgttgtccaggccgatcaccgataccagtttgccgttgccgtggatcatgcagttgcggctgtcctggatcaccacgtcgcctttgctgacgttgccgtggacgtctttatcgttgaccgcccacagcgaggcccagcagcccacgtcgctccaaccggcactgagtggcaccacgcaggcgcgctgggttttttccatcacggcgtagtcgatggagttgtccgggcagcaggcgaaggtggcttcgtcgaaggacacggtatcggcatcctgttcgctgcgttccagggtcagcaggcaggtatcgtagatgtccgggtcgtgctttttcagctcttcgaggaagcggctggcgcggaacaggaacatgccgctgttccagaagtaaccgccgcttttgacgaactcgatggcgcgtttttcattgggtttttccacgaactgctcgacgcggctcacgccttccggcagcagcgaatcgttggtggacttgatgtagccataaccggtttccggacgggtggccggcacgccaaacagcaccatctcgccacgctcggcagccacggtggccagggccagggcgcgctgcagggctttctggtcgtcgatcacgtggtcggcgggcagcaccagcatcagctcgtcacggccttcgttgaccagcatcatcgcggtgagggccacggccggcgcggtgttgcggccgaacggctccatcaggatgcgttggctttccaacttacgggcggccagttgttcgttgacgataaaacggtggtccttgttgcagaccacgatcggggtgtccatgccttcgaacaccaggcgctccagggtttgctggaacagcgtgtgctcaccggtcagggccaggaattgtttagggaactgtttacgggaaagcggccaaagacgtgagccgctaccaccggaaaggatgactggaatcatgggggtttctccttgaatcgatttgggtcagagctacgaaggtttgtcgtttcactcttgtttttgtctcggtccgggttggtctcaaccaacccggaaaaatgctttagcgggtcgacactgggcgtttcacccagactggcgacaagctcgaaccggaacctgtgacgtacagcacggctgcctcaccacgttccagggccactggcttcacatcgccgactttcttgtcaccgtcatacagcgccaggctcaccttcaccgggttgatctcacgctcgccacggcccttggctgccaccgacttgaccacatcggtcttgccatcggcggttttcagggtcagggccttgtcgctgaggttctgcacgcgcaccagggacttctgcttgttcttgaacggcggttcttcgatcagctgtggctggccgctgccgctgttgaccagggtgtagtagtggtctggagcgagcttgaccggtacggtctggctgccgaccttggcgctgtagtcaccgccgggcatgaagctgaagtcgctgctggccagtggggccacgtcgctcaggttggtggcgccaacggtagcgctgacttcctggttgctggcgttgtagatgcgcacgaagctcgagccttttggcgcggtagggccgtacagggcggcgtcgccaccggcgaaggcggacatcgatacgaagctcaaaccggctgcaatggccagggttttagcgagacgacgcggagttgtagtgaaagtcatgtgagttacctctctttcagttttgcgcccggtcgggcgtctcggatttttgagtgttcaaagccatgttctgttggcgcgaaccggcttgtttaagctgcgcaacccacgcggggtcggcatcaccgatttcgttgttcacgggcagataacgttcaggaaactcccagatcagcacctggggcgggctgttcttgaagtcatcgcttttcaggtagctgagcatcggcaggatcgggccatggccgtcttcggcgtagctgaccacgtcgctgcccagggcttgcttgagggcaccgacgaagttccagttggggttggcgctgtagctggtgcccaccagcgccaccggggtttcgctgtcgctgaacagcgcgtcgtcacctttggtttcggccaggtgcgtgacacgtttttgcagcggctcttgcggtggcatcaggttttcgaacagcgggtccagcggcaggaacagacgcaggtcgcctttgtgcggtgtggtgctctcggcctcggtgacaaaacgctggggctcgccgctcagtggggtcttggcggcaatggtcttggctagttgcttggcggcgatttcagcgccgtccggggtccagtgggtgtcggtgcgcaggaacacctgcttgccgccgagcttggcctgttgcagcgggccgagcaggtccggggcgatgatcttgtcggcggcgacacgggcgtggaagtcctggtaaaggttggcgtggatgctggccggtttcacttcacccaggtgttccggatacaggcgcaccttggccggcacgattgccatcaccagttggatgccttgggccttgagcttctggcgcacgccttcgaccagcgcgtagttaccttccaggttctggtcttcgttgacggcggggttgaactcctcgtcgctgtacaaccagtgatcgcggcccaacaccacaccagggcggccttcattgaacagcttgtagtccagcgccgcccacaggttggtgcccaggcgcttgatcgggaactggtcgtcgtagtgagtctcgaccgccttggtccagcgaccgttgagcacggtggcgtcggcattggtgctgaagccgaagaagctgcgcagcgaccaggcgcccagggcgagcaacaccaccaggaacaggccgatatagaggacgcgtaatgaacgggtcatggtcggctccctcagaattggaagtaaaggaacggcgagaaactctgcgccgacagtttgagaatcgacgccacgaacagcagcagcaccgcagcgcgcatggcgtagcgtggccagtcagcggtccagtaggccggttgcacagcggcatcctggcccacggtgaagccgggctggtggatgctgccggggttgtcgcccggtacggccttgatcaggctcgggtcggccggcttggtcttctcggcagggcgattggtgtagaagtcgcgcaggccaaagaacgccagggttgcgtaggccaccaccagggttgccacttgcaggccggtgaggttggcgcggttgagttccgacagcgaccactcgccaaagctgaacatcgcaccgtacatacggccggcgacgtgcaggttttcggcgcggaagatcacccagcccatcaccaccagcaggaaggtgaaggcccagcgcaccgggttgaagctgcgcggcgaagtgttgaggccgatggctttttcaatcgccagccacatgccatgccacgcgccccacacgatgtaggtgatgttcgcaccgtgccacaggccaccgagcagcatggtcaggaacaggttgcggtaggtggtcagcgtgcctttacggttgccgcccagggtgatgtacaagtagtcacgcagccaggtggacaggctgatgtgccagcgccgccagaactcggtgatcgactggctgatatacggctgcttgaagttttccatgaagcggaaacccatcatcaagcccaggccgatagccatgtcgctgtagccggagaagtcgaagtacagctgcgcggtgtaggccagtgcgccgagccaggcatcaccggtggtggggttctgcagggcgaagcagtggtcggcgacgactgccagggtgtcggcaatgaacaccttcttgatgaaaccctgcatgaaccgcgtgcagccctcggaaaatttgtcgagggtgtgggtgcggttgttgaactggtcggccaggtcgcgaaagcgcagcaccgggccggcaatcaggtgcgggaagatcgccacgaacgccgcaaagtcgatcaggttgcgggtcgccggggtatcgccacggtacacgtcgatgatgtagctgatcgactcgaagatgtagaacgagatcccgatcggcaacagcacgtgggtcaggatgaacggctcaaggcccgccgacttcatcatcacgttgatgctgtcgacgccgaagttggcgtacttgaagtagccgaggatgcacaggtcgaccgccacgccgagcagcagccagcgctgggccggcttggtgcgtacgccggcggcaccgaccttgaggccgatccagtagttccacagcgtcacggcggcgaacagcgccaggaagtccactcgccaccaggcgtagaacacgtagctggcaatcagcagcagcaggttgcgatagcgttgcccgctcaaatagtacaagccgagaaagatcggcaagaacagaaacaggaacacattggacgagaaaaccatcccgatctctccatgtttaaccaacagtcaagggccagagcccccccaaacccccccacgaaaaatcgggggcgggccgtacaacattccaactgacgaaaccgactcgaactgtgggagggggcttgcccccgatggcggtgtaacagtcgccatctgtgttgaatgacaccctgctatcgggggcaagccccctcccacatttttctaccgtgttttgtcaggaacccttgttgcctttctcatgcgtcgggtcgtagaccttggtcaggtcgcccccgaggcggaaggtcttgaacggttgcatcccatgcttgcgctcgatcacgtccggcgcgcaggtgtagagggtgcagaagggttcgagccaggcgaatttcatgtcctgcttcaagtccttcatgtcctgttccttgccgttcttctgttcaaagacctcgggatccttgaccccggcgagcactttgtcgcccaggcgcttgagcgcgctgttgttttcctggcgcaggtccacgccattgaccagggcaaaactggcgatcatcgacagcggcggcagggcgtagttgtggtacgacagggcgcgttgctgacgcttcaattcgttgggcaggaacccttggtcgtcgacctggttcacgccgaccttgtattccttcaccgcccaatcaaacaggtcgcgacggttggtggcgacggacgttgccatcaccgaccaggcggcccagtaggagtggttgttggttttttccagcggcaggttgtcccagtcgctgaccacttgatcggcaagcttgttgaaccaggcttcgatcagttgcgattcctgctggtgattggccaacgggtgcgagtcggagaacttcaggcgcacataggccgaggccatgctgcccagcgcccatttgcgcatggatttgccggtgtggttgaagtccttggacatcaacgcatcggccttggcccacgacaccagccagttcagagtgcattcgagctgctcgggacggccgtcacgcatgaactgcatcacgcgcttgctggtgtctttttccagcttggtgatgtcggcagtgctgtcacggaaggctttttccgactgcacgttcagggtggaccgggctttgtccgagccttcgtacttgctgcgaaactgcagcggcccggtgtacggcgccggcatggtgtcgcagttttccttgaagtcgccggtcttgaacgcttcaatcggtgcgaaatagccttgtggcggacgcagcggtgcggcggcgttgacggagcctgcgaacatcgccaggcccagtaacgtagggatcagtaacttctgcataggtaacctcattgcccgagggaggcggttttttggccgccgcttgggaatacgttgcgtgtgcaaattttcgcttcgaccttctgcgcagcagcgcccgcttcgggaccctgcacttccacggccagcaggttctgcgaggcccagtcttcatcggtacgcagttcaaaggcgaaacgcccgtctgtatcggatgtttcgggtttctcgatcttgatgtcctcgtggcgcccgttcatgtaccagagggtggcttgcagggttttcaccgacggatcggcgaagcggatatcaacctggtgattggcattacgcaggtctttgttcgaactgttcaccagcaattcgttcttgccgggtttcaacgtggtgctcgcggtcatctgcgcggtcttgccttcgcagccgttgtcgagcagggccatcatctggcggtagatggtctcctggtccaggcgatacagcggcgagaactcccagatgaggattttcggcgggctcttctggaattcatcgctgcccagatactgaatcatcgaaccttccagaccaccgccggggaaggcgacgttgaggatgtcggcgccgatttcctgttccaggaagccggcaaagttgtagttcttgccgctgtggctggtgcccaccagggtgatctgcgggttgcccgaatcgccgaacaggtcgccgtcgcccgcttcgcccttgggctcggtggtgaactggtccatgtactggatcgcgtagctggtgccgcacagttgcccggccatgttgtgcagggtgccggtcttgcccatgcgcccggagcgcttggtttcgaattcgcgcttgggaatgtccgcgaactcgggcatcgcacgcactttggcaccgacgatttttgcggtgcgctgggcgccgtacggggtccagtgctggtcgccacggaagtagaagtcgtgggcgggcagttcatccggcagttgctcgttggtcaacggcgacaggtctggtaccacgtagcccatcttggcgaagcggccgagcatggtcttgtagttacccagggccttgtcgaagtcgaacttggctttctcttccgggttgagtttgttgcggttcaccaggccacgggtcggctggtagaccaccaccagttccacgcccttggccttgaacgcgtcgtgcagctgttgcatgcgcttgtagccggacggggtggtgtcgaattcggtgcgcaggtcttcctgggtccggaacaaccagtcgccctgggcttgcaccagggtggtgaagttctgctgatagcgcgtggtgtagttgcgcgcatcatgggcggccgggcacaggctgcagcacggttcggcggtgaaggttggcgccttgacttcatcggcgcgtacgccctggctggccgcgagcaggccgagggtcagacccgagaggctcagcagtttgatcatgtgtgggtgcataagggtcatcctcagtcctgcatttcggtctggcgttcgacagggtcgatcagcacggctttctgctggcgcaccagcaggtcgagaatctcttcctggcgatcgccaagcacgccggagaagctgatgccgctggatttggtcggcgccagcatcgacacgcggtacagctcgatgctcaacggcgagtcgatggacagcggcccgctgccgttacccgccagttcaccgccgaccacgatcagcgagaccttggcgtcgaacgggtcgagggcgatgtcgcggtcggtgtcggtcaaatccttgatgtggccgtacacaccggtcaggccgttggccatcgcggtgttctcatacagcttgatgttcacgctgttgcgcacgcggatgccgtggcggcggttgctgatcaccttgttaccccacagcaggttatcgccgctctcatagagggtgatgccgtcggtgtggttgcggtagatctcgttgtcggcgatcaggttgttcacgctgttacggtcgatcaccaggcccgagagcttgttgtcgtagctgcggttgttgaagatgaagctgtcgttcacctcacgggaaatgatgatgccgtgcttcttcttggtgccgtagacggtgttgtccgcgatgatcaggccgtgggaacggtcgtgggggtcaatgccgtagacgatgttgtctttgtaggtattacccttgatcacaaagcccgtggtctcgtagcagtagaagccgtaccacatgtccgagaactcggaatcgatgatccagccggtcggctccggacgcttgagcaccttggccatgttcggcgtgtactgggaaatactcaccccgtacgacttactgttggcgtagccaaaactggccatcttggtgttggagatataggtctcggtgccgccccaggccagcaggaacgggcggaattccttgggcgacttgaacagcgccgggccgttggccttttcgctccagccggtaaccttagtgtcacgcacaaacagctggccgtcgttgatcaggaacgaaccgccttcctgggacaggcgcagctcctgggtcttcttgtcgatttccaggatgcccttgcgcccgaccacgatcggcaacttggccacgatcactcccggcgaggtctcgctcaggtactgcttgggcaccttgcccagcaggtccttgaggttcatgtagccgtcgtcgacaaagatcgcctggggaataccgtgctgacgcaccacccattcggccatcttgttgtcaccgccgatgaaatccttgagcgcatcttcctgcatcatgcggcggatgctgattttgcctggcttggtccttacgatctttttttccattgccgcggcggtgtagcccgacaggtccggcagggccggcttggccatttccagcggcgcggtcggcgggctggagatggtgtaggtcttggcctgctgcagttccttggcgatggtcggcgccttggccgccgtatcggcaaacgctgtggcactggccaacagcattgccgctacgagtaggctttgagcattcattgggcgggctcccatcagaatttccagatcacgtcgacaaacgcgcgatgcatgtacgagtcgacgttgctgccataggcatcgcccggtttgaatacgccggcacggaaacgcaccagcgccgatggctcatcaatcgactggctgagcgccgccggcaacaggccggtcttgaagtatttggtgaccaccaggtccatttcctgacccaggtctttcttgccatcttcaagcggcagggaagtactggacaggatcgcgccggtgacgtcgtcggtgttgttctgcactgcatcgataccgttgctgcccaccggcttgttgccgtcgacacgccagaacttgtggtacaccaggctggcgtcgtagtcctcgcgcagctgccaggaaccgaacaggctcatggcctgcatgttgttcatctcaccacggaaggcctcaccgaagcggtgcacacgggactgggtgccggtccagttcgaacggttgctttgcaggccgttctgctcgtactcggcgctggcgcgggagtaggccgcgccgacttgccactgcgggtcaaggcgcaggcggatacccaggtcagtggcccagccattcacgttatcgctgcgcttggcctggtcggggcggctgccgtcggctttcaacgcgttgacggtgtcgcggtcgccctgcatgccggtgatgctggcccaataattgacggtgttggtattgcgccagttgtaggcgtcgctgttggcttcgataccgagccaggtcaggtcgccgttttcgcgcttgtccaacgagtcggtgggtacgcccggttccgggtagtcgagcttgccgttgtcatgggtgtggtgaccgcgcaggccgatccactggccgggcgtccactggtaggcggcgtcggcgtagaggtgctgacggtccttgtccttgggcgacagctccttgaggtcggtacggtactcgctgaaacgttcggcgacgccgacattggccttgagcagggtggtgtcgaaggtccagttcagcgcttcgatgttggtgtcgcgccattggccgtcgtcattgcgcaggcgttggcgacccagcttgaggatctcgccggggtagggcgtgaagccgctgtagccgacccagaactcgcgcatggccaggtagtttttcttggccttgcggtcgttgttggtggtctgctggttcgcgtcatcggccgactgttgcagcgggtcggtctcgatgatgtcgctggacaccaccgcctggcccatggcgtaggcgctccacgcgccgctttcaccgtagatccacgggcgcaggtcgaggccgacgccgttgacgtcgccgcctttctgcgtgccgaggtcgcggtcatcttcggactgtgcggtggctttgacttccaggccgaagttcttggcttcggtcagcgcggccagggtcgggcacgaccacagcagggcgaaggtcaggccgatgccggccttgacgaatgggttgagcttcatagggattcctcgccgtcgtcttcttcatccagggcgtgcagttgcaacgtgctctgggccagggtgccgcgggcggccagttcctgttgcaccaggcgttggccctgggcgcgttgctccggcgtcaagggcgcttcgagctgggtcgccaggtcattggcttccggggtgtcctgggctttggccagctggctgaagacataggcgttcaatgggtcgggcttggtgcccttgccttgggaaaacaactgggcgatggcgaagtcggcgctgttctggccgttgcgcgcagcagtcagcaagtggtcgagggctttttgcgggtagaccttgcccaggtagccacggcgatagatctggccgaggtagtaatcggcggccacttccttgcccacggctttttcgaaatgcgcttcggcggccttggcatccgccggcacccacttgccttcgtagtagagcttgcccagcaacagctcggcgcgcggctggtcggcggcgcggccgttgtccaggtacttcatcatctggtcgacgtcgccgagttcggggaagtcgtagagcagttgcgccaggctgacccatgaagccgggtagccgggggcgattttttccagcagggcctgggcggttttttcgtccggctggccgagggtggcgtcacccagcacgcgcgccacgctatcaacacgttgtgcggtgacggtgccacggctgtagccggcttccatctgcttgagcagctcggcctgtttttccggctcggcttttttctggtagaccgtggccagttcgacgtagcagatgtcggtggtgttcagcgcggccttgcagatgcgctccacgtcatccagatgctggtcgtaggtgtcctgggtgcgatacagcagcacctgggccaggccggcttccgggtaaccggcggcctgccattggctgatctgctgctgggcattcacattcgggaagctgtgcgggtattgcaggtacagcatcgccagcgggatcagggtattgccttcgccattggcaaaggcttttttcagcaggccttcggcttcatggtgttcggcctcggtgctgccgggcttggccaccagcaggcgaccaaggcgcgcctgggcgcggggcgaggtatccgccgccgcacggtaggtggcttcggcctgtttgatttgcgccggatcgcgggtgcctacctggatgtcggccaggcccacctgggcctcgctgtagcccaggtctgccagttgctggtaattctgctgcgcggtgacggtgtcgccacgcttgagcgcttcattggccaggcgttggtcgggcaggccggcgcaaccggcgagggcgatggccagcgccaggggcaccggcaggtttcgaagggcgctcatgattaaagacccgcagccatggctttatcgatcagccagttcagcgatgggccacggtcgctggtgacttccaccgggcgcccggcgtaggtgctgtccagcggtgcgtccggcttgatctgcacgcggatgtcggaggacaggtcggcgctgttcaggctggtgctgctgacgatggtgccggtgcggatctgctcttcgtcggccacctggaagctcaccggtgtaccggggcgcacatcggcgaactggcgataggtgaagcgcgcctccacgttggcctggctaccgcgtgggaccagttggaagatcacgtcgcccttgctggcgtactgaccgtcagccaccagttgctgcgccaccacgcaatcgcacggcgacgtcagggtgccggtcatttgcttgccgaacagctcttcaaccttggccggttgcagttggtcttcgtccaggtggcccttgagcacgtcgagcatgctggtgctgaaggtcgccagtggcgcgcctttggcggcgaccgcatcacccttgagcaggctctgcacggtgccgtcgcgtggcatagttacgttcatgccgggcacgctgaccaggccggcctgggcatggctgacgaagtacatgccgtacaccgacttgaaaacgaaaccgaaagccgccaggccgacgatgaagatacccgcgctgaacaccacggcgcgcaggcggccggcggcgctcatgttgctgccgctgtccttgaccttgcgtgccttggtgaagttgtcgcgttgcagggtcgccagcacgtcgcccatggtcacgatgtcgccggacaggtgcgaggtgatcaggtggcgcagggtggaaatatcctgggcgtcgaggttctggaactggcaaccggtgcggccggtctggcggtcgtaggagcggatctgcagttccacgtccatggccaggccgaggttatcgatgacaaattgcaggcggcccttgtgcacctcgccgacggtcaacggctgggtggcggtgaacgccaggccgccggcggacaggtcgatcacccgtgcttcggtctgggtgcggtcggtgttgaagaagcgcagcttggccgggattttcacgcgggcatgttggcgctgggcttcggattcgtggacaacgttggcgtttactgggctgttcatagttcggtttcctagttaattcaggcttggcagggtcagaccatcatcagcaacacggcaacgaagatgctgccggcggagaaggtcatggtccgagacgaccaggtgttgaaccaacgttgaaagctggccaaatcgcgggtcagtttggtgtcctggcgggtccaggactgttgatcgaggcggaagaacacgtagatcttcaccagcgcgcccatgatctggttgtaatagagaatcaccgggtacgcggggccgatcttgtggccggagcacgacagcagcagggtgagaatcaggcgagtgatgccgatccacagcaggtacgcgaggatgaaggcgccgccgtatttgaaggtggcgatgatcgccacggtcaggccgagcagggacgtccacatcgacacgcgctggtcgaacagcacgatgctggtgaacaggcccagccgacgcacacccaggcccagggctcgggagttctggcgcaggttgttgccgtaccagcggaacatcagcttgcggctggccttgatgaagctcttttccggcgggtgttccacggtgttgatcgcggcgtccggcacgtagaaggtgtcgtagcccaggcgcatcaggctgaaccagctggacttgtcgtcgccggtgaggaacttgaagcggcccaggcgccagtgctgcagcgagtcgctttccacgtcggcgataaagcccgggtcggtgaccacgctggcacggaacactgacatgcggccggtcatggtcagcacgcgcttggacagggccatggagcacatgttgatgtgacgctgggcgaaacgcagcttgtgccactcgctcatgatgtagccgccgcgcacttcgcagaactcgttggtggtcaggccgccgacgttgccgaacagttggaaccacggcacggtcttgcgaaccacgccttcggcgagcacggtgtcgccatcgatcacggcaaccacggcacggtcgtccggcaggtggcgggagatggcgcggaaaccgaaagccaggccgtcgcgtttgccggtgccggcgatgcgcacgaagtcgagcttcacgtgttccggtggattcatgcgttcccacaggctcttcaccagcagctcatcggacatttccaccagcgagcagaccacggtggtggggaagccacattcgatggcttcacggatcaccgagctgtagacctgcgcagtggtcagcgcgtcgatacggaaactggtgaccatcaggaacacatgggacgggtcggcagccttgcccagcttgcgcactttgcggcgcaggtgcgggtagaccacatacaggaacaacatgccgcgaaagaaatgcgtagcacccatcgagtagcgccagatgccgacggcgccaatcaggaaaataaaattcttcgactcggagtcgaacgtactcgccggcaagagcagggcgagtcccatcagcaggctcaaaaagaacagccagccggcggattggagcagtacgtgttttaacttggacataagcgtcatccgaaggtgaagaaggctcccggctgcaagcgctggggatgggaacgcttgcagcccggaacttgccgttgctgttaccagcaaatgccttcggtacggcctgtggcacaggtggccttggacatgaagcccaccaggtcgatcacttgcttgccgtgtggtgcgttctgcgccagggcacggaacttctcatcgcggttgcccaggatgatcacgtcggagttgttgatcacttcgtcgaagtccgagttgagcagggacgacacgtgcgggatcttgccttcgatgtagtccttgttcgcaccgtggacacgggcgtactcaacgttgctgtcgtagatgctcaggtcaaagcccttgccgatcagcatttcggccagttcgaccagcgggctttcgcgcaggtcatcggtgccggccttgaagctcaggcccagcagggcgactttgcgtttgtcgtggctggagacgatgtcgaaggcgttctgtacctgggactcgttgctgcgcatcagcgagttgagcagcggcgcttccacgtccagggaaccggcgcggtaggtgagggcacgcacgtctttgggcaggcacgaaccaccgaaggcgaagcctgggcgcatgtagtactgggacaggttgagggtcttgtcctggcagaccacgtccatcacttcgcgaccgtcgacgccgacggccttggcgatgttgccgatttcgttggcgaaggtcactttggtggcgtgccacacgttgcaggtgtacttgatcatttcggcaacggcgatgtccttgcggatgatcggtgcgtcgagttcttcgtacagcgactgcaggacatcgccggaggctttgtcgaactcgccgatgacggtcatcggtggcaggtcgtagtcggcgatggcggtggattcacgcaggaactccgggttgaccgcgacaccgaagtcgacgccggcttttttgccggagcagtcttcgaggatcgggatcaccacgttggccacagtgcccggcagtacagtgctgcgcacgaccacggtgtggcgggtggttttgtcacgcaggacaaaaccgatttcgcggcacacggcctcgatgtagtccagttccaggtcgccgtttttcttgctcggcgtgccgacgcagatcatcgacaggtcagtatcacggatggcgtcggcgaagttggtggtgccacgcagccggccggtttcgataccctggctcaacaactcgcccagaccgggctcaacgatgggcgatttgcctgcattgatcaggtcaatcttgtccttggagatgtctacgccgaccacatcgtggccacgggcagacaggcaaccggcacagactgcgccaacgtaacctaaaccaaatatgctgatgcgcatcgcatttacctctttgtcttcaagaccgtattaatcatgccaataattggccggagttcatgtttgcaagcgtcactgatgccacggaagttgggcgaatagacgcctacttaccgcgtacaggcatgttaattagtgagtgactaactattgcactcaagttgtgcgcaacttggccttgttattggggcttgccctgaaatgcagccggcctttctggggaaaggtgccgacgccagtgccgcaagaccctgatagaggcttttagcctttatttatcaacgtcttgggtgtcatcactgacacatttgggtaagcgctgccttggcctataggggatagcaattgatccttatcgccgccctcaactcatatcagttgatgatatgacccgtgagtcaaagttgatgaggtaactttgctacttccttgggtcgtcatgtaagtcatctcttacagaaacagagaatttcgttaccggtggtatgagccgtgggtttaggcgaagttccgggccgctcatcctgtttcctgaaatttcttgaaatattaggaaagatggcactggtagtatattgatagcacttgctatttgggccagtagttatagggagttggcgcgcggggatagttttgtgccactagtgtttgaaaaaagtggtgccactacgaaaaaaatcgacgaatgtcgagtgaaagaattgttagagatgcgtcgggatattttttgacgtcaaaaaaatgacgattcgcgaattaaaatgcggttaaaaatgtgggaggggacttgcccccgaagacggtgggtcagctaaagataagctggctgatcgatcgtcatcgggggcaagccccctcccacatttgttcatcagtgttctcgggagctttattctggtgcgtgatcgcgcaaaaacaccaggttatccggcttggactgctcggcgttgaagcgatagccctgcacatcaaactgcttgagcttcgccgggtcgttgatgcgttcctcgatcacaaagcggctcatcatcccccgggcttttttggcgtagaagctgatgatcttgtactggccgttcttcaggtccttgaactcggtgttgatgatccgcgccttcaaggccgtacgcttgaccgccgagaagtattcgttggaggccaggtttagcagcacgtcgtcgccttgttcggccagcgcttggttgagccactcactgatacgcgtgccccagaaggcgtacaggtccttgccacgggcattgggcagcttggtgcccatttccaggcggtacggcatcatcaggtccagggggcgcagcaggccatacaggcccgagagcatgcgcaggtggtcctgggcgtagctgaagtcggcatcgctgaaggtctctgcattcaggccggtgtacacgtcgcccttgaacgccagcaacgcctgcttggcgttttcctgtgtgaacgcaggcgtccagctgccgaagcgggcggcgttgaggccgccgattttgtcggacacgtgcatcagttcgctgatttgcgccgggctcaactcgcgcagttgctcgatcagctcttgagagtggtcaaggtattgcggttgggtgtagcgcggggttaccggctttgactcgaaatcgagggtcttggcgggggaaatcaccatcagcatgaagtcgtctcctgtaaacgtggggggattctaggggttggggcgttttgactccacctatgatggcgataggcgcgatccgctatgatggccggtgactctggagagggagaccctgtgtgcgaatagcgcttttgttgtcggcatgcctgctatgcctgaatgcccaggccgcgccggtggatgtggtcagcctggaccgtggcacctggcccgaaaaactcggcagcccggcgctgttcgatgtggcttcacgcgccgaaatcctgatgttcgcccacagcctgctggccagcgagaaccaggacgaaaccgcgctcaagcaacgcctgggcctgaagatcatcaacctggccgccatcgacgacctgcgccgccaactctggcagcgcctgctggagaactacaccttcgcccagcagagctgtgaggaagacgcgtcgttctgctatctggtggaaaacatggatgacctgcgcgagcaggcgggcaagttcgaggtcggcgaaaactctttctatataggctgggccggtccgagccatattttccatgagcgctacctggatgaactgctgcgcaaggcggcgctgtttccgcagatcagcagcgaaatcgcgcgtttcggcgaccatgagcgcaatggcgacgagttcaacgatcgcctgttcctgctgacgttcgatggcggcccggcccccgtcagcggcaataccgactggctcgccgactacctgcgcaagcaaaagatgaacgcgaccttcttcgccctcggcagcagcctgcaaacccgggtcgagcgcagctcggttgccgatgtgcaggcgctgtaccagggccagtgtgttggcacccagggttggcagtaccgttcccacagccattgggtggactggcagagttcgatcacccgcagcgcgtcgttggcgcagaacctgatgccggaaaactacgtgccgctgttccgtccgccctatggccagcgccgcgcggacagccagggtttctttcaagcccagggcttgcaggtagcgttgtgggatatcgactcccaggacgaaccgggcaagctcaaggccgatgagtcggcgcaacgggtgctgaccttgatgctgttgtggcgcaaaggcgtgattgtgttccacgacacccaggacaaggcacgggtcgctttgcccatgctgttgcaggcgacggcgcagagtggtctgggttggcaggactgccgggaggcgtttcgctgaagtgcccggaactgttgggttttgggcgatttcggggtgattttgtgcgatatttcgatgcaggcggacttccgactttagcggggtatgtggcactcggctagtgctattcgtcatcctgaaaaataaacttcaaaaaagcgtcaaagtgctttttcctgtcacacgttttgcggtattacgaagtcagatcgccgaaacctgcaacacaggtggcgtcttccaagactcctcatgtgggcactgcgcttgacgtcactcaggtgcagtcggtggtcgaatcgaggcgcagcaccgcccaggtattgcgtcgactggctcccacaaaggtgaccgagtatggatgatcatggacgtaacccttcttccgaccagccaatcctttatgtgcttgataccaacgtattgatccacgatccaaacgcactgctcaacttcgaagaacaccacgtcgccatcccgatgatcgtgcttgaggagctcgacaaactcaaaagcggacaccacagcgtggccgccgaatgccgccaggccatccgcctgatcgacaagacattgggcgaagcctcgccggaagatgttgaagtcggcgtgccgatccagcgcggcaaaagcggacccaagggcttgctgtcgattctgatgagcaagcgcagcgagcccaacagcctgctgccggagaacctgaacgacaacaagatcatcaaccaattgatcgacctgcacgcccgcgacaaggacctgcgcgtggtgctggtgaccaaagacatcaatatgcgcctcaaggcccgagcgtgtgggatcgcggccgaggactacagtaccgaccaactggtcgacgacgtgtcgatgctgtcccgtggttatcacatgatgactggctcgttctgggaccgcgtcagcaaggtcgaaacccgtcaggaccatggccgtacctggcaccaggtgcagctgatcgataacctgccggccgtacatatcaatgagttcatcgtcgacgaacagggcttcgtgggctggatcaaagagatccaggtcgacaagctgctgatcctcgacctgcatcaggaacccctgttgcaccaggaagcctggggcctgaaaccgcgtgatatctaccagagcctggcgctgtacgcgctgctcgacccggacatccacctggtcaacctgaccggcgccgcaggctcggggaaaaccatcctcgccctggctgccgccatcgagcagaccatggtgaccaagcgctatcgtcgtatcatcgccacccgcagcgtgcagggcctggaccaggagatcggtttcctgcccggtaccgaagcggaaaaaatggagccgtggctgggggcgatcaccgacaacctcgaagccttgcacatggatgatgaaaacacccatggcagcgtcgactatatcctcagcaaagtgccgttgcagttcaaatccctcaactacatccgaggtcgcagcttccagcagagcctgatcctgatcgatgaatgccagaacctcacgccgcaccagatgaaaaccatcatcacccgtgccggcgccggttccaaagtggtgtgcctgggcaacctggcacagatcgacaccccttacctgtccgcgaccagctccgggctgacgtacctgactgaacgcttcaaagacttcccgaacggcgtgcacattgcgctgcagggtgttccacgttcgatcctggccgaatacgccgaatcccatctctgaccgtcagcacctactaaaacgggcgccccatgggacgcccgttttttgtgttcaggccgaccgctcgaccagcgcccaatcgatcgccggtttgtgtgccctggacagcagggtgtacaccgacggcaggacaaacaaggtaaacagcgtgcccaccagcatgccgatcacgatcaccagccccaacccaaagcggctgctggcaccggcacccgacgagaacagcatcggcaccaggcccaccaccatggccgccgtggtcatcaggatcggccgcagccgaatgcgtgccgcccgcatgatcgcctgggccggcgtgcagcggtacagcacctgcagctcgttggcgaactcgaccatcaggatcccgtgcttgctgatcagaccgatcagggtgacgaggccgatctgcgtgtagatattgatggtcgccagccccagcgccaggggaatcaacgcgccgcagatcgacagcggcaccgtgatcagaatgatcagcgggtcggtcaggctttcatactgcgcggccagcaccatgtagatcacgatcagcgcaaacaggaaggtcagcatcagcgcattgccctcgtggatgaactgccgcgaatcggcctgccagtcatggctgaaactggcgggtaactggcggctctgttcctgcaagaaagccactgcctggccgaggctgacgccgggtgccggaataccctggaaggtcgcgctgttctgctggttgaactgcttgagcttgttcggctcgatcacgttgtgcagcctcaccacggtggacagcggcacctgctggccggtgtcggtgtcgacgtagaagccattcaggtcctggggcgtgaggcgccgcgaggcctggctctgggggatcacatcgtaggagcggccttgcagggcgaaccggttggtgtagttctcaccgatcaacaccgccagggtactgccgatgtcctgcatgcgaatccccaggctgttggccttgctgcggtcgatgcgcacttgggtcaccgggttattgaacgccaggtcactgtcgaccaccgcaaacagcccgctggcccgcgcctgggttttcagcgcctccatggcctggtacagcgaacggtagtcttctgtactgcgcatcaccatttgcaccggcaaaccaccggtggaggcgggcagtggcggcaactgaaacacgaagatcgagttgccttccacggcgtcgacactttgttgcagctcggcctggatcgtcgcggcgctgcgctggcgctgcgaccattcggtgaagttcaccccggcaaaactggcggcgacgccgtcattgccgttgatgatccaggtgctcacggtctccggcaagtggccgagaatcccgctcaactgataggcgtagcgctctacataatccaggttggcgtgctgtggtgacttgatcgccagcagcaggttgccctggtcttcgttgggcgccaactccttgctcgcattgccatacagccagggcaggctgagcagcaccaaggcgccgaacaacaggatcagcccgcgcttgcgcagcgaacccagcaatgcgcgctgatacaggcgtgccaggcggtggaagaagcgctcggccaggcggctcatggtgccttcgtgctcctggccaggtagcagtttggcgcacatgaccggggtcagggtcagggcgattaccccggagaccagcacggcgccggccagggtcagggcgaactccttgaacagcgcgcctgtcaggccgttcatcaggccgatgggcatgtacaccgccgccagggtgatggtcatggcgatcaccggcgaagcgatctcgcgcgcgccgaacaaggcagcctgcagcgcgctgcggccttccttgacatgccggtggatgttctccatcaccacaatggcgtcatccaccaccaggccgatcgccaacaccatcgcgagcaacgtcagcaggttgatgctgaagccgaataacgtcatcaaacccagggcgccgagcatcgacaacggaatgctgacgatggggatgattacgctgcgcaccgagcccaggcacaggtagatgatcaccaccacgatcaggatggcctcgatcagcgtttcgatcacttcgataatcgaggcttcgataaagtgcgcggtctcgaacgccagggccaccttgacccctggcggcagggttttctcgatgttcggcaacaggcgcttgatgtcggcgacgatcaacagcgggttgcccttgggggtcgcatagaggcccaagtgcaccgcgggcttggcgtccatcagcgcactggtttcataggccgccgaacccagttcgacggtcgcgatatcgcgcaggcgcagcaggtggtcgccgttgttgcggatgaccatgttgcgaaactcatcgaggctgctcaggtcggtgttgacctgaatcgaggagatcacatagtggcctttgatctgccccggcgctgcctggaagttgttgttgcggatcgcctgttccacctgggcggcactgatgccgtggcctgccatgcgttgcgggtcgagccacaggcgcatggccaggcgctggccgccgaaggtctcgaccttggccacgccgtcgatcgtggaaaacaacggctgcaccacgcggctcaggtaatcgctcaaggccgaggccgacagcgaatcactggaaaaccccacgtacgccaccgctgtcgcatcgccggcggaacgttcgatcaccggatcataggcctgttcaggcaggcggtatttgacctggttgaccttggcaatcacatcgctcaacgccttggccgagtcctggttgagtgccatgcgcagggtgatctggctgcggccctgcaccgatgaggaactgacatagtccacgccttccaccgaggccagggactggttgatcggttgggttacgaagccttgcatcagctcggcgggggcgccggggtagtcggtggtcacgctgatcaccgagctttccaacagcgggtattggcgcacaggcaggtcgaggtaggccttgagcccggccagtacgatcagcaggctgaccaccagggccagtaccgggcgacgtacgaacaggtcggtgaatttcacgggttttctccggccatggtcatccccgaggacgggtcggcatcgttcaacaccgtacgttcgaggggctcgatagcggcaccgtcactgagcttgatctgcccggaaatcaccacgcggtcacccggattcaggcccgcatcgatcaccacgcggccattgcgccgctcgctggtcttgaccaatacgcggcggacgacgggtggggtattggcatcggtcgatggctgcaccacgaagacatcttcgccgtaggcgttataggtgatggcggtttccggcacgctcaaggtgttgccgggcaatgactgtggcaggcgcactttggcgaacatgcgcggcaaggcgccgtcggtgggggcctgcagtagcgcctggacactcagggtgcgtgagcggtcgaggaacgggtcgatactgctgatgcgtgcgctgaagctttgcctcggcagggcgtcgagttgtacatccagggtattgccgaccttcagttgtgccagggcttgctccggcacgctgaagtttacgtacaggcccttgtcgccgaccaggttgatcaggctgtcgccggggttcacaaattggcccaggtgaaccttgcgaatcccgagggtgccagcgaacggtgcacgaatggtcaattggtcgatctgcgccttgagctcctgcagggcgccttgagcggtggtgtattcggtctgggcattgtcgaaggcttcgcgagacgtggcgttcaccttgaccagggtgcgcgagcgttccagcttgaccttggcattttccaactcaccctgcaggcgcatcaggttgccgcgttggggcgcatcgttgagcctgaccagcacttggtcgcgctcgacgcgctgcccggattccactggcaactgcaccacacgcccgccgacttcagccggtacgctcacctgctgcacggcttccagctcaccgatggcttccagatagcgggtgaacggtgcgtcgctgaccggcgccaccgccactttgatcggcgcgggcgcgtaggcagcggcagccggatggctccagcgccacaatgcccacgccaatgcaataaggatgaccacggcaatcgacaacgccacggtggttcgtgagacggcacgtccggatcgactgacgtgtgacataagcttcattccttgatggcaatcagtagatgggccagcagcccggcgtcagtagttcgacgaggttctcatccggatcgcggaaatagatgctcgatccacccttgggccagtgggtgcgcccctcaatggcaatatctgcgttgtccaggcgcgcctcccaggtcggcaggtcgtcggcgtcgatggcaaagcagatatgaatgcgcccgttggcgtcatggggcgggatctcgccgccgctcaagtatttggtttgaagagaggcgccccgtttgaagagcaagagggtattctgctggccgacgtttaacgcgacgagtacgttgctctcgaccatcgtctcaagctccaggtgctgggcgtaaaacgctttggcgcggtcgaggtcgtctacgtacagcgcggtctcaatgattcgtttgagttgaggcatggttttgctccttgttgaaggttgctccctgagatggaattcacagcatggtcacggtcctactgcgcaatatcgatttgaatctgttggtggtgctcgatgcactgctgactgaaaaacacgtcacccgcaccggtgcacgactgcatttgagccagccggccatcagtcattccttgagtaaattgcgggtgctgctcgacgatccgatcctgatccgcgagggtaacgaagtggggctcagcgccctggcgcagaatatccaggtgccgttgcgcgacatcctcagccagatcgaaacactgttcggcaagtccatcgacttcgacgcggccagttcccaacgcacctttcaattggcgatgtcggactacggtgcggcgattatcctgcccaagttgctggtgcgactgcgcagcgaggcgccgaacaccacgctggtggtgacccagggcagccggcatgcgatgttcgagcaagtggcgcagggcaagatcgacctggccctgggggtgttccccagcctgacgcccgatgtgtcgatggaagtgttgttcgaggaaacgttttcctgcctgctcgaccggcggaccctgtccaaggacggcatgctcgatctggagagctacctggatcgtccgcatatccaggtgtccatggatggtggtgccaatggtgaagtagacagtctgttgcgtgccgaaggcttgcgccgtcgtatcgctgtcagcgtgccgcactggcgtacggcgccgagcctgttgcacaacaccgacctgatccttaccgtcgccacccgcacgctggaagacacgttgctcaacccggacctggtgcagttgccgccaccgttcagcattccgcgctttccctttgtgcagatctggcaccagcgattctgtgacgatccggcacatgcgtggttgcgcgaacaggtcaagcaagtggtggctcataccgtgcaggtcgactgatcggggcgcaggcgtaaccgcaagtcctggcccaactgggtcacttcgtacagggtgaagtccagggaatgggtgaggttttccagctccggtaaatgcaccagcggccgtgcgaggtcaccgagcaggcgcggcgcgacgtacagcaacagctcatccaccagcccggcgcgcagcaggttgccggccagggtcggcccggcttcgaccatcacatcatgcaaaccgcgcaggctcagatggaccatcaaggcatgcagatcgagaccactctggttgcccggcaggccgagcaagcgctcagtgttggcgcctggcggcagatgttgctcgtgcaccacatgcaggcttggcgcctggtcgtcgaacaccttcgcggtatcgggcacccgcgcctggctgtcgaggatcacccgcagcggcgcgatggcttcggcagacgccatctcacgtacggtcaatgaggggttgtcggccagcaccgtgccgctgccggtgaggatcgccgcactgcgcgctcgccaatactgcacatcggcccgcgccctggcgccggtgatccattgcgagcgcccgttgttcagcgcggtgcggccatccaggctcatgcccatcttcaactgcacccacggccgatgacgcttgaccgaggacaagaagccacggttcaactcgcgggcggccgcattgagcaagcccacgcgcacctcgatcccggcgtcgcgcagttcggcgatcccacgaccgtcgacctgctcgaatggatcttcgtgggcgacgaccacacatgccacgccagcctcgatcagcgccaggtgacaggcgccggtgcgcccgacatggctgcagggttccagcgtcacataggccgtggcgcccttggccagggcaccggcctggcgcagggcgaagacctcggcgtgcggaccgcccgcacgccgatgccagccttcgcccacgatgtgtgcaccgtgggcgatgacgcacccgacccgtggattgggccaggtggagtgactgccgcgctcggccaacgacaatgcatggtgcatatgttgaaagtcgatttcgctgaagtgggtcatgggcggcgttgccctgccacagcgtgggcggtgatcgggtagatacgcccgtcgtaggcgctggccaggaagccactgccttcggcgtcatgggtcaggcatgaaataccgctggcggtgatcttctccacctttgcccatttgcgcttggccaggtcgaacacggccacggtgccgccgtagctgccggtggcgatcatctggcggtccttggagatggcaatgcacttgatcgagtggctgtgaggggtgtcatacacctcgctgttgccggcttgccacaggcgcagcttgaggtcgcgaccgatactggcaaagccgccctggatctgcgtgcagccgttggaaatacggtcgtgggccttgtccaggtaggtttccagttcgaagtcgctgatccggaagaacgccgcggccgctgtcgcgcatacgctgaacaggtactgttcatcggcggcgatgcccttgatggcgttctcgtgcatgcgcacttcgcgcaggaaacgcggctgctggtgttccaggttgaagatcaaggcttcgccagtgtacgtacctattgcggcgtgcaacttgccatctttttcaaaggtggtgccgcagttgagcggtgagcggtgctggtagatgacgtcgccggtcttggcgtcgaacaccgtgcccatctggccgccggtcaacacgctgtcgccgaagggcagcaggaagttgcacaggctgccggccttggtgctgggctggccattgatctgcaggatgccggcatcaccgatgctgtagatgtcgtcgccgaccacggtgactgcgttcaaactgatggccggctcgatgccgcccacgtcccattcctgagtggtgaaatcccaggtggcgtaggttgagccgaaggtcacgaaggcgatgcgatggttgcccagcaatgcacagctgcgtggccagatgatgcttggcagtgaagtctgggcggtttttaccagttggttatcgggcgtcaactcccacagcatgacgcaacggtcgtagctgaggctgaccagcaggcgctgcgcgtcgttccatacgatgcgcttgatgcccgcggcatgggcagcttgcaggtaggtgccgctgctgctgatcacggagattttgccttcgtcgtcaccggcgaaaatgatgccctcacgggacagggccaccgtgtcggtttcgacgccgcccaggtcgatcaggtccagttgttcgccgctggcagcgtcccaacggcggatcgaaccgtcatcgctgctggacaccagggtcttgccatcggcggcccagcacaccgaaatcacgtcggcatcgtgaccgctgaggatccgcagggttcgcccgctgaggtcgaacaggcggatgctgtggtcccgcgagcaggtggcgatggtctggccatccggcgagaaggcggccatttcgatgtcgtcatcgtgacccaccagcacgcttttcaagcgcagcgagggaatttcccagacgcgggcggtgtagtcgctgctggcactgaccagcagggtgccgctggcgttgaacgcgcattggttggccaggtggtcgtggagcacacgctggatcggcgtcttggtttttgcatcccacaaaataacctggttgtcataaccggcggtcgcaacgtacgtatcgttgaatgttgcaataccactaatagggccaaagtgtctcatgcgtcatcatccttaatgtagtgtgggcggaagaaagtgtcaggcgcgcttcggttgtttcatcaggttgatcacgtgatttttcttatcgactttcgcttgcaggtaatgagtgttatgtcgagtgacaaacacacctgtcggaataacgttgtccactacaatgccgttatccaccagggcctgaactttgtccgggttattggtgatcaattggcactgtttgatgttcagcgcttttaacatgccagcggccatggaaaagtcgcggtcatcttcaggaaagttcagatgggtattggcttcgaacgtgtccatgccagaatcttgcaggcggtaggcgtccaactttgcatataagccgatgccgcggccttcttgccgcaggtagataagatagccacccacttcctgcatgcgcaggatcgactcgtttaattgcgggccgcagtcacagcgctgtgaactgaatacatcgccggtcaggcattcggagtgaatacgcaccaacgggctgatgggattggcggggccaagctttatcacgatatgttcgtgtgccgtgtccaacccactgaacgtgtagaaagttccagggttggaatggtcgtccagggggatatcaacatggttgcgtacgcttaggcggttcatggcggttccttccgtgcttgaatgttcaacgcgttattgttttggtacggggaggggttacagggtttgtgcgaggcgaaagcccattacgtaaatctgtcgcggatacttgccgtgacgccggcaattgcgggtcaggtcgcgaaaccgcgtgaagctgccaccacgggcgatgcggtgggtgccgaccacagtgacgaggtcgtcggtgatggcggtgccgccggggtagggggcgtagtcgtcagcgacgaattcttcgacattgccggccatgtccaggcagccaaatggcgacgcaccctcgaccagaaggccgaccggggtggtgtcgaacaggcccagttcagcggtgttggcacgctcgggcaggaaggtatccccccagggatattcgaggttttccgggccggcggcggcgtattcccattccgcctcagtgggcaggcggaagctgcggccactggcttcgctgagccaggcagcgtaggcgtcggcgtcttcggcagtgaccccgtagaccggatggttggcgcgttcgtgagggtactgtccgaaggcccagctttcgggaatccgtgcctgcgtgttggcttcgagaaaggctcggtattcgaggttggtcaccgggtatttaccgatggcgtagggccgcaggtgtacgcggtgacgagggacttccttggcgatccagtcccgatccaggcccaggccgcgcatgtcgtgcatcacttggtcgaccgccgattcggccaaaccgatctcgacggtgcctgcgctgatttgaatcatcgtagggttgagtacatcgagcctggggtcgttggtcagtgccagcagttgggcggcggcatagcgccaggccagcggcgagacagggttttcgacgcggttggccaactgttcgctggtctcttccgaaaccaggcgccaggctgccagcggcaacttgagattgacggcttcgtggaagtgctcaggcaggcccatcaagaaacggtctgtcatttcggcggtcagggggccgtcgaacacgggccaatggttgaaacccttggaagtcataacgctcgttttcctactgcgtgggagaaaaggcacgtacacccaggcgcacgtacccggccttcagagggtgcagatcagtccggtttgcaggcagttgcgttcgaagtcatcccagtagcccttggggtgcttggcccgctcggcctcggaaataatcggtttttgccactgcaggcgggagaagccggctttcatgattgccagctcatagcgctcgcggctccagcgatggaaggtgaaggcgctgggcggtgtggtgacgaattcggcgtggtgacggaagccgccttcgtggggttcttcggtgagtacgtgcacgccgtatttggtgaagttgccacgtttcaattgaaaggttggctctaccgtgtaagccacgacccgtccgccgggggcgaggttcttggcgacgacttggaacatcttgtcgagtttttctggcgaatcggcgtagttgaacagccaggcggcggtgatcaggtcgaatttgccgagaatgcccagatcgcagatatcgctgacgtggtactcgatcggctcctggttgcgcgccgactcttggcgggccaggtcaatcatggaggcggaaatatccacgccaaccactttgctggcaccttggcgatacagctcgcgtccgaaaaaaccgaagccgcaggccaggtccagtacggatttgcccttgggattaccgaccatgctgaagaaggtcgcggtttccaccgagcgctgcgaggcgctgtccgtgaaagcttcgaagcgttcgccgatggcgtcgtaagttgccgttgcagtttgagtggtcattgcctcacctttttaaagttaatagctgtcgtcaatccctgactgggagcatgaagagttcttctgttttcggtgaccctgttttgtctgaatcaagtgcgagtggtaataaggaaccctcctatgacgacaagtacgccgaccagtttgttaatgttgagagactgtttggggaaacccagcaggccgaaatagtcaatcgcaattgaaacgataagttgtccgatcaataccgccatgatgaagttgagggcgccgagtcgaggcgccatcaataacgctacggtaatataaaaaacgccggcaacaccgcccatccaaatccaccagggcccgtcttgcacggcggcaagattagggcgaggcgccttgactgcaataatgacaacaatgagtacaaccaggctgaccaatagggatactgcagtggcccataaaggatgacctagcagattacccagtttcgcgttggtgcctgcctgcaagggcactgcaaaaccggcgaataaactgagcaggatgaaatacagtaaggtcatgaagtaggcattccgttttttttcaagttttacggtgcttggattgttggcgccaattctttgttctgatggggagtattcgtcgcactgatcgggcatttggctactcgtgattcagcggcgggctacgggtgtaatcaggtgtgcgcaatcttgaccgacgggtttacaatcgctgctcctgatcaggagtatccctgtgctgactcatctcgattcccaaggtcgcgcccatatggtcgacgtcaccgacaagtccgtgacgttccgtgaggccgtggccgaagcgcgcgtgcgcatgctgcccgagaccctgaaaatgattgtcgacggcgcccaccccaagggcgacgtgtttgcggtggcccgcattgccgggatccaggcggcgaaaaaaaccagtgacctgattcccctctgccacccgttgatgttgacgggcgtcaaggtcgaactgagcgccgacggtgcagactcggtgcatatcgtggcgcgctgcaaactctccggccagaccggcgtggagatggaagccctcaccgccgccagcgtcgcggcgctgacgatctacgacatgtgcaaggcggtggaccgtggcatgaccatcgaaagcattcgtctgctggaaaaactcggcggcaaaagcgggcatttcaaggcggaccaggcatgagcatcaacgtattattttttgcacgttacgcagaagctgtgggctttgattcgctggagatggagggcgagttcgccaccgttgatgctgtgcgcctcgcgttggccagtgacccggagtttgcagtactcaacgagaccagcctgatgtgcgcgcgcaacgaagagttgtgtggtctcgatgagccggtgcaggcgggtgacgaagtggcgttcttcccccctgtgactggaggctgagcatggccattcgtgtacaggcccaggcctttgatccaggcagcgaggtgaatgccatgcacgcggccaacgttggcgtgggcgcggtggtgagtttcgtggggtatgtacgcgacttcaacgacggccgtgaggtgtcggggatgttccttgaacactactccggcatgaccgagaaggccctggccaagatcgccgtcgaggctgaacagcgctggccgttgctcaagctggaggtgttgcaccgcatcggcgcgctggagccgggtgagccgattgtgttcgtggcggcagccagtgcccatcgccaggcggcgtttgatgcctgtgcgtttgtgatggactacctgaagacgcgggcgccgttctggaagaaggagaacaccagtgaggggccgcgttgggtggaagggcgtcacagcgatcacgccgccgcagatcgctggaagtcttaggccaaacacagcaccaaatgtgggagggggcttgcccccgattgcagtgggtcagccaacagagatgttagatgtgccatagctatcgggggcaagccccctcccacagtttttactgcattccagcttacggacgcttgcgttccacggcgcgcaacaggtgcgtcggcggcgtctcgcaactgatcttgcgccctagcagcgcttcgatcgacggcaactgatacgagtcatcttccccggcaaagctgatcgacacacccgccgccccggcacggccggtacggccaatgcggtgcacgtagtcatccggcacttccggcagggtgaagttgatcacgtggctgatgccgtcgatgtgaatcccgcgtcccgccacgtcggtggccaccagcacacggatcttgccttcgcggaagccttccagggtcttgatacgcttgtgctgtggcacgtcgccggacagttgcgcggcgttcacaccatcacgcaccaggcgttcttcgatgcggcgcacctcgtccttgcggttggcgaacaccatcacgcgctcccagccgttgtcgttgaccaggttgtagagcagcttgtacttgtcggcgccagccaccgcgtagatgtgttgctcgacgttttcgctggcgacgttttccgcttcgatctcgacgatggacgggtcggtagtccactgcttggcgaggttcatcacgtcttcggtgaaggtcgcggagaacagcagggtctgacgctcggatttcggcggggtctggcgaatgatctggcgcacttgcgggataaagcccatgtcgagcatgcggtcggcttcgtccagcaccatcacttcgaccatgtccaggtgcacgtcgccgcgctggttgaagtccagcagacggccaggggtggccaccaggatgtcgcagtgacgagcttcgaggtgcttgagctgcttgtcgaagtccatgccgcccacgaacgtcatgacgttgaggccggtgtacttggtcaggtcggcggcgtccttggcgatctgtaccaccagctcccgggtcggggcgatgatcagcgcgcgcggttcacccatgtagcgctctttgggcggcggcgtctgcagcagttgggtgatgatcgagatcaggaacgcggcggtcttgccggtgccggtctgggcgcggccgatggcgtctttgccggccagggtgaagcccagcacctgcgcctggatcggcgtgcaatacgggaaccccaggtcctggatggcgtgcatcagttccggggccagcttgaaatcatggaaacgggtcttgccttcctggggctcgacgacgaagtcttcgagtttccacgcaatcaccggcggttttggcgcacgttcacggcgcggttttggtgccaccggtgcggcaacgggctcgactggcctggcctgttcggctggggtcaccgtcggcttcttcggctgggcggcaggtgcggtccggtcgggctgtctgccgtcattgcggctgccggctgtcggggcaggagcactggaatctggcgcgagcggctcagcctcgcttttgccgaacatcttcttgagtgctttgagcacggtgatctcattaattggttaaggaatgtacgccggccagtgtaatgcaagaatcgggcgcggcgtagtgcgtctgtcatacagctacataaacgctggttttcagcccaggcgagcggtcaaccaggcaccgatgtcgcgtatctcctcgggtaacacttcgtggcccattgggtattcctgccatgtcacggtgacaccacggctcttcagatgctcgtaggcgctgcggcccatggcgttctgcaccacatcgtcgtattggccgtgcaggcacagtgcgggaatgcgctgctggctggcggataattccagctcgtcgctgaacgtgggcgcgtaggtggagagggcaatcacgccgcccaaggggccttcccaattcaggaaggcggtgtggaacaccacggcgccaccttgggaaaaaccggcgaggaaaatccgcgaagcgtctattccggttctcttctgtgtctcgatcaggtccgtgaccatttttgccgacacttccagctcttccaggctgatggaacgggccgggctcatggccttgatgtcgtaccagcttggcatctcgtagccaccattgatcgtcaccgggcgggtcggcgcctggggcaaaacgaaacgcgtggtcagcaggctttcctgcagcgcctcggccaccggcaggaagtcgtagcgatcggcacccaggccatgcaaccagataacgcaggcgtctgcgggcttggcgggctgaagaatcaagggttcggtcatgtctgctccattaatgtgcgtgcgctccgattaagtgcgacggaacggtgcgcgatgggttgatctgttaagaagatgtcgcacggttgaatctttttctattgaccatgggctgaaacgactcagccatcactctggtacggggcttgctatgtgttgaacgatgtcagcgctatcccgggacggtaacactatcagtgactgccgcttatgggatagcaactggaattactgcgacaacttcatgccgcttgaccctaaaaaaagccaacacgggtcgatatcgcctcataagggtgcgctgaggttcgagctccgacacaacaagagcaaactggaggtttgaatgaaggtattgaaatccaccctggccatcgtgaccgcggcggctgtattgggtgtcagtggtttcgcccaagcgggtgccacgctggacgccgtgcagaagaaaggctttgtgcagtgtggcgtgagtgacggcctgccgggtttctcggtaccggatgccagcggcaagatcctcgggatcgatgctgacgtttgccgcgctgtggccgctgctgttttcggcgatgcgaccaaggtcaaattcagccagttgaatgccaaggagcgtttcaccgcgcttcaatccggcgaagtcgacattctgtcccgtaacaccaccatgaccagctcccgcgatgccggcatgggcctgaaattcccgggcttcatcacctactacgacggcatcggcttcctggtaaacaacaagctgggcgtgaaaagtgccaaggaactggacggtgcaaccatctgcatccaggccggtaccaccaccgagctgaacgtttccgactacttccgtggcaacggcctgaaatacaccccgatcaccttcgacacttccgacgaaagcgccaagtcgctggagtccgggcgttgcgacgtactgacctccgacaagtcccagctgtttgcccagcgcagcaagctggcctcgccgaaggactacgtggtgctgccggaaaccatttccaaggagccactgggcccggtcgtgcgtaatggcgacgacgagtggctggccatcgtgcgctgggttggctacgccatgctcaacgctgaagaagccggcatcacctccaaaaacgtcgaagctgaagccaagtccaccaagaacccggacgttgcgcgtctgctcggtgctgacggcgaatacggcaaagacctgaaagtgaagaaagactgggttgtacagatcgtcaagcaagtcggtaactacggtgaagtgttcgagcgcaacctgggcaagagcaccccgctggaaatcgaccgtggcctgaacgcgctgtggaacgccggcggcattcaatacgcaccacctgtgcgctgatcgctgatggttctgtcacccggtgggccaaccgccgggtgatgttctgttccattatttccggggcacttcatgcaaaatcaaatcggcgcacccaagcagaagctcagcttcagcgaccctaaagtgcgtgcgtggctcttccagatcatcacgatagtggcggtggtctcgctgggctggtacctcttcaacaatacccagaccaaccttcagcaccggggcattacctcgggtttcgactttcttgaacgcagtgccggcttcggcatcgcgcagcatttgatcgactacaccgaatcggacagctatgcccgagtcttcgtgatcggtttgctcaacactttgctggtcacttttatcggcgtgatcctggcgaccttgctggggttcatcatcggtgtagcgcggctgtcaccgaactggatgatcaacaagctggcgaccgtgtatgtggaagtgttccgcaacattccgccgctgctgcaaatcctgttctggtacttcgcggtgttcctgaccatgccggggccgcgtaacagccataacttcggcgacaccttctttgtcagcagccgtggcctgaacatgccggcagcgattgccgctgacgggttctggccgtttgtggtcagcatcgtcgtcgccatcgtggcaatcgtgctgatggcgcgttgggccaacaagcgttttgaagccaccggcgtaccgttccacaagttctgggcgggcctggcgctgttcatcgtgatcccggcgttgtgcgccttgatcttcggtgcaccactgcactgggaaatgcccaagttgcaaggcttcaactttgtcggcggctgggtactcatccccgaactgctggcactgaccctggcgctgaccgtctacaccgcggcttttatcgccgagatcgtgcggtcgggcatcaagtccgtcagccacggccagaccgaagccgcgcgctccctgggcctgcgccccgggccgacgctgcgcaaggtcatcatcccgcaggcgctgcgggtgatcatcccgccgctgaccagccaatacctgaacctggcgaaaaactcgtccctggccgccggtatcggttacccggaaatggtttcgctgtttgccggtacggtgctcaaccagaccggccaggccatcgaagtcattgccatcaccatgagcgtgtacctggcgatcagcatcagcatttccctgctgatgaactggtacaacaagcgcattgcgctgatcgagcggtgaggaaacgcccatgagtacgcatacgttcaaacctgatatgccgccgccgaacaaagtgttcgggccgatggcatggatgcgcgccaacctgttttccagctggctcaacaccctgctgaccctgttggcgttttacctgatctacctggtggtgccgccgatcctgcattgggcgatcctggatgccaactgggtcggcaccacgcgggccgattgcaccaaggagggcgcctgctgggtgtttatccaacagcgcttcgggcagttcatgtacggctactaccccggcgacctgcgctggcgcgtggacctgaccgtgtggctggccatcgttggcgtagcgccgctgttcatctcgcgtttccaacgcaaggcgatctacggcctgagctttttggtgctgtacccgatcatcgcctacttcctgttgcatggcggcatcttcggcctgaccaacgtggcgaccagccaatggggcgggctgatgctgaccctggtgatcgccaccgtcggcatcgccggtgccttgccgctgggcatcatgttggcgttggggcggcgctcgaacatgccggcgattcgggtggtctgcgtgaccttcatcgaattctggcgcggcgtgccgttgatcaccgtgctgttcatgtcctcggtgatgctgccgttgttcctgcccgaaggcatgggcatcgacaagctgctgcgggcgttgatcggcgtgatcctgttccagtcggcctacgtggccgaggtggtgcgcggtggcttgcaggcgattcccaaaggtcagtatgaagcggccgcagcgatgggcctgggttactggcgcagcatgggcctggtgattctgccgcaagccctgaagctggtgattcctggcatcgtcaacacgttcatcgcgctgttcaaggacaccagccttgtgatcatcatcggcctgttcgacctgctcaacagcgtcaagcaagccgccgctgacccgaaatggttgggcatggcgaccgaaggctacgtgtttgcggccctggtgttctggattttctgttttggtatgtcgcgctattccattcatttggaacacaagctcgacacaggccacaagcgttaggagttgttgttatgagcgaagcgatcaaacagcctgtgagccctgaaggcattatccagatgcagggcgtcaacaagtggtacggccagttccacgtgttgaaagacatcaacctcaacgtcaagcagggcgagcgtatcgtgctgtgcggcccgtctggttcgggcaagtccaccaccatccgatgcctcaatcgcctggaagagcaccagcagggccgcatcgtggtcgatggcgtggagctgaccaacgacctcaagcagatcgaagcgatccgccgcgaagtcggcatggtgttccagcatttcaacctgttcccgcacctgaccatcctgcaaaactgcacgctggcgccaatgtgggtgcgcaagatgcccaagcgcaaggccgaggaaatcgccatgcactacctggagcgcgtgcgcattccggagcaggcgcacaagtttccggggcaactgtccggcggccagcaacagcgcgtggcgattgcccgtgcgctgtgcatgaagcctaaaatcatgctgttcgacgagccgacttcggcactcgacccggagatggtgaaagaggtcctggacaccatgatcggcctggccgaagacggcatgaccatgttgtgcgtgacccacgaaatgggctttgcgcgcaccgtggccaaccgggtgatcttcatggacaagggcgagatcgtggaacaggcggcgccgaatgacttcttcgacaacccgcagaatgatcggaccaagctgttcctgagccagatcttgcattgatcgatgcttgaaacgataaacccggcctggcgccgggtttatttttggggctaggacgctttgagcgtttcagcgttatcgtgtttgatgtaggtgaacgcgccgcgcatgtctgcaccctcggccagggtttttgcgtcagccagcaaatgcgggtgacgatccagcaagcgcatcagtaataccaggggtttgggggcaagcagttcgccgcgttcgtagcgtgagaacgcgttgtggccgcctcccgacagcagttcgacggcctctttttgcgtaagatgcagcttgcgtcggatgcgttttatctcggcgccgatgatttgtcggaaggcaaggatcaattcttccttggctttgccgtagcggtctgcactgtcgttttctgggtcccagaatccgtcaccacacacctcacactcccagcctgaaagattgtcgatccgacgctccatatctttgactctgattgtttcgctgcggccctggtaataactcaatgcatcgggggccccgcagatgcagcacagctctttctttttcatgggttttctccttgaaggagatcaccggaggtctaccgtctgtgcggtaagtgcccttgatgtaaatctccctacctttcgagtgggtgtggtacacgtcctgccatactcgatggtctccataagtggtcatcgacttgtacagcatccagtttcgcaactcataaataacgtcctgcatttcctcgatgccaaatccaagacgctcgccacattcctctgctgtccgggtgaatgctttccttcccaaccgcctcacatccgcctttatcaccgccaaatcgtaatgaggtgtgtacttttccataagacacctgagttcataattaccctcagagggtaatttcaccaatcgaaaatactgctcctttacctgcctaagaaccgtagtgcgttgcctttgtaggcaagtccgaataggctgtaggaaaattcatcctatgattggacgaaagtgcgaaacccatgacagacatcgccccgctgatcaaacgctccctggtcgaccaggccctggagcagttgcgcctgcgcatcaccgaaggccggtgggccatcggtgagcgcctgcccaccgagcccgagctgtccgccgagctgggcatcagccgcaataccgtgcgcgaggccatgcgcgtattggcgttctccggcttgattgaaatccgccagggtgacggcagttacctgcgttcgatgaccgacccgctgggcgcgatgcgggcgttgtcccactgcaccctggagcaggcgcaggagacgcggcagattcttgaagtggaagccatcgggttggcggcaatgcgccgtaccgagcaagacctcatcaccttgcgcgaggccctcgataccagcgccgcgctgtatcacggcgaccttgaggcctatatcagcgctgacctggtgttccacaaacacctcgtggacgccgcgcacaacccggcactcagcgagctgtaccagtatttttcgcgcatcgttgccgcccagttgcgccagaccctgaacatttcaccgcgtcgccaagcggtgttcgacctgcataccgccttgctcgacgccgtggcacagcaaaacccggaacgcgccaaatccctctgccggcagttgatcaatgagccttgaagcccaacgtaaaaccgaattcgaagaactgttgatcgacgccgaagccgacgacgaggtggtgcagcacacgccaccgccggtgagccgcccatggctgttgctgctgggcctggtcctggtggcactgaacctgcgcccggcactgtcgagcatggcgccgttgcttgccgacgtctccgccagcctggggctgtcggcagccagggccggtttgctgaccacgttgccggtgttgtgcctgggcctgttcgcgccgaccgctccgctgctggcgcgccgtttcggtgccgaacgggtggtgctgggcatcctcctgaccctggccgcaggcatcatcctgcgcagttcattcggcgaagccgggttgttcgccggcagcctgattgccggggcgagcatcggcatcatcggcgtgctgctgccggggatcgtcaagcgtgatttcccgcggcaggcgggcaccatgaccggtgtctacaccatggccctgtgcctgggagcggcactggcagccggcgcgtcggtgcccctgagccacgccttcggtgacagctggagcatcggcctggggttctgggtcttgccggcattggtggcggcgctgttctggctgccacaagtggggcaaaagcacggtgcccaccaggtggcctatcgcgtgaagggcttgctgcgtgatcggctggcctggcaggtgacgttgtacatgggcctgcaatcgtccttggcctatatcgtgttcggctggttgccgtcgatcctcatcggccgtggcctgagcgccacgcaagccgggttggcgctctcgggttcgatcatcgtgcagttgctcagctcgctggcggcaccgtggctggcgacccggggcaaggatcaacggctggctatcgtggtggtgatgctgctgaccctcggcggcctgttcggttgcctgtacgcgccgctcgacggcctgtggggctgggcgatcctgctgggcctgggccagggcggtaccttcagcctggcgctgaccctgatcgtgttgcgctcgcgagactcccacgtggccgccaacctgtcgagcatggcccagggcattggctacaccctggcgtccatggggccgctggcggtcggcgtggtgcacgactggaccggcggctgggcggctgtgggctggatcttcgcagtgctgggcctgggtgccatcgtggccgggctgggtgcggggcgcgcgctgtacgtgggcgtgcgcagcgagaaggtctgagggttacaggtacctcacttcgatcgttaccgagccgtcgataggttgttcttcgatcaatgtcagcgtgttggccggggcgatggcggtgtcgatttgtacatcgctggtcaggtccttgactgccagcggcgcgggggcgcccgtgacgtcattgctgaaggctatgaggctgtcggggtgccacaaatagaagctgcccgggaacgtctgccacgaacttccgccgtcctctgacctgatcggcgtcaggtcccctccgtctgcggacgcgcccagaaagcgcagtgagatattccccagtttttcgccgccattgatcaggcccaggccccagtgtaggtcgagccagccggatccggggcggttatccacgcccttgagcgcaaacaccgtggcggcctcgcagttgatctgcagttgcataacggcgacaggcagttgggtggggatctctttattgaggtcgcgtgccgacaccttgccgtgatccaccacaccgccaccgctcaaggttggcgtgcaggcgctgggcgtgatcagccctttcacggtcaggtcgacgctgctggcagccagggtggtggcgccatagcccgtcaacagggtggcagtgagggcggtgataagtgttttcattttcagggtgttcccagggcagtcatcgggtcagggtgttgcggtcagaggtacaccacttccagcgtggcggaaccgtccatcggagtctcggtgctcaagtccaggttctgcttggcgttgatcaccgcctccagtttcagcgtgctggtcagcgtctggatcgccgaggggccggcggtgctgccttcgatattggtaaagcccaagaggcttcgggaaccgatatcgatcgggttgcgattggaggttcgccacgccaccccgccggtggtggactcggtgccgtagatcaccggcaagtcatcgaccacggtttgcttggggtcgaaactcaccgagtacacaccgatcttgttgccgctgctgtccaggcccagcccgtagtagatctcgctgttgacatgggcggtgccgtcgcggttgtcgcgcatgcgcagggcataacggcccgccgaattgcagttgacggtcagggtcaggtacttgagcggcaggcgtgtgccggttgcctggttgaggtcctgttgggagatcttgccgaagtcgaccagcccgccggcggacagcacgggtgtgcaggccatgggggtgatcaggccggtcaccgtcaagtcgacggtggaggcagcctgggccaacgagccgacaccgagcagggacacggcggccagggggatcaggtgagtcttcatcgcgtagctcctttttcagtgggtcagaggtagatgatttcgagggtgcccgagccgtcgagtcgcacttcattgctcaggtccagggtgtcgaggggggcgatgaccgcttcgacgttggctgtggcgctcaggtgttgaatcgcgctcgggccgttgctgctgccggcgctggcagtgaagcccagcaaacgtgtggcacccacgtcgatggggttggcgctgctgttgctccaggaagtgccggcggtggtggagtcggtgcgatacacctggggcaggttgtctgcggtggtatgcgcggggttgaagctcaaccgataacggccgatgttctgctgtcgcgcgtcccggcccaggccgtaggtgctgtcatcgtcggggccgctggcggtgccttggcggttgtcgtgcatgcgcagggcaaaaaagctcggtgcgtcgcaggccacgttgagcaccaggcttcgcggcgccagtgttgtctcctggcgcgggttcaggtcattgaccgacagtttgcccagcgccacggtgccgccattggacaggctgggggtgcaggcggccggtgcaaagcgcgtcgtccagcgcaattcgcgggcctggccggtgtggaccgcatcgaacaggccggcgctgtcccaggtcacggcgtcgcgtacccgcagggcctcttcgctggcccacgcccggccctccaggcgcaatgacaggctgcgaccgctggccgccacgccgttgcgtaacggtacgaccccgtgttccgggcgccaggtgagggtgctggcgctgctcaccggcggttggccggcggcggtaaccagccccaattcgaccgcctggccatccagcaccgcgtcggtcacccgcaggccgtagctgccccgttcggtgaagcgaaaacgctctgcgctggcgcccatggcgcggtagaacacactcacgtcggtgggctgctggcagttcagcgtgaggttgaaccggcgctcacccagcagccgttcaggcgtgggcaactgcgctgcggcgcggttcatcaggccgaaatccagctttgattcgctcaggctgagctggcagtcttccgccccccaggcgctggcactcaacaacaggatcaggggcaacaagtggggtttcaggcccatggcaagctcctcatgatgcgcggcactgggccggggcagtttcgaaatacaggtcggggtcggctttcttcggcagctcgaagtccagccggcaacgcggttggccggccgctttgatccacaacgcaccttgctcaagcacgttgggcaaaaacacctggctgccttcctgcaccaaggtcacgaactcgccgctgtcggtactcaccaccgcgccccgcggcaatggcgcaccgtggtcgttggtcacgctgagcaatgcgcgacgggtgaccaccacgccaaactgcacgctgtcgacggcaccgcgcccggccgacagcaccgccaggccgttgttgatatcggcgttgcgtggcagtgaacgggtctgcacttccaccgcactgcgaccgtaggcggtcagttgcggcaccacggcctggccttgccagtcggtccataccggcccgctgggggtgttcaccttgatcccggccatttcgcccacggacatcaccgcaaaggtgtcgcgcaccgggtacggcgagaaggtcacgccgtcgccatgcaccaccacgccgccacgggcaccgccctggtagctggcgttgtcggcattggagcgggtgtagttgaagtccaactggctgtagtacggcagggctgacacaccgagggacgattccacttcctggtcgcgactgtcacgttcaacgcccacccggtaactcaattgatcgttgagttgctcgctcacgcccaggcccaggcgatgctcgccgccggtgttgcgggcccaggcgcgggcgcggcgggtctcgcccagcggtaggctgatattcaggtacaggctgttgtcactctgctggcgaccgcccatttgccattcggcgctggccgacaccgatacccggccgaaactgctgccccacgacgccagcgcccggctgctgctgttgccgtcataggacgatgagcgggaaaccccggcactgaaggcgccaaactgcgggtgcgaccacgacgccgtggcgctctgttggtcacggtagcgcgtgcgttgttgttcacgggtggggtgacggtaggtggaatcttcaaggtcgcgataacccagggaacgccaggacgctgctgtgctgatcgaccagctttcgctcaagcgctgggaccaggagaggtcggtctgtataccttgttcgtgctgcacgcgagtggcttgagcggcttgcagcgtgccttgcaactggctgtcctgccagggcagccagcccaggttcaggcctgccgagcggtagtcctcggccatcagtgcacctgcacccacactgacttgcgggtgcagcgcaccgctccagccggcgctcaccacccagggttcggcgccgtcgtcgttgccgatcttgcgcacgcgacccgctgccaccgagtaccccggcgcgggcagccccaggccgagcatcgctgccggtacagtaaagcggcgttcttcgccgctggtttccttgaccgtgacttccacatccgagcgactgttcaagcgccgcacatcggtcagggagaacggcccggccggcaccaccgtggaatgaatcaacgtgccgttctggcgcacttcgacctgggccgggctattggcgatgccgttgatggtcgcgccctggttctggtcctgcagggcggtttcggtgaggacctgcgcgccggtgatctgggtgcccgccagcaccgggttgtacaggctgatctggccagcctgcagcaccgcctgttgggcggcgaaggtgcgttgggcgtaggcatccaggtgggtggtgcgtgaatagttgtcctgccaggtgcgcacctggcggctgcgcacaatccagtcgccggcgttgaaaccgacttcggtgttggccgagccgaagcggctgttgtcgtcgtcgtattcgttgtacagcccggtcaggtcatagttgagcaggccggcgaagccgccggtctggtagccggaaatatcctgggtgacggggcgcagtgcatccgtcggcaccaccagtgacagggtcagggcggcggggtcctgctcgatcacggtctgcggataggcttggataaacccgtagcacgcgccgtattgcgcactgtcgatggcttgctcgggcacgttgaggttgcctgcgtccagcagcccgcgggtgaaacacaaggcgccttgctggtcgaagaccgcgtccacgcgttcgcggcgctggccgttgacggtcaggttgactgcgtggcgtccgggggcgaagcgtggggcctccagcagcaggtgggccagttgggggtcgatgccccgttgggacagggtctgggggtcgaaagtgccccgggttgcggtctcgtcggccaggctttcgccgccgggcagcgtgctgcccagggccagtgccaggagccagcgcgagcggcgcgataaaaaaccgggcgcgacggtgccgtcgcggtcagtggttactgtgctcacaaggtcgtactcaatgtggtgaccttcaatgggaggtcacttcgttatcagggcgctggcctgtctgtgcctgcgcctgggatcagcgggtgagaggcgcgtcgtagggcgccacggcaaagccgtacacggtggccggttgcagttgcacggtggttgcgcccggtgcgctggcggtaacctgcaaggtttcccccggcagcacataagtgcgtggcagcagcgccgagccgttgccgggcagcaaacgcagctcctgggccaggcgcaccacataaggcgtagggttgtgcacgctcaactgctgctggtcgaggcgccaggtcaagccggtccagggcgaacgattgggcgccaggcccttggggtgcaggatcaccggcaggttctggcgcaccgtcacgccgacccgcgcatgcccggcctgggcttgcgagcgtccttgcggcatgccttcgaaaatcactcgtttcaggcgttgggttttcagcggctcgggcgattgcaggatgaaccggatgagttggctcttggacggctcgacccgggccaacggcggcgtgacgaacagcagggtggccttgtcttcggggatgtcttccagggtgacgtgcagcagggcgagccgcgagtcggtgttggtcactgacaccgacgcttcgccgtcggcttcgttgacgatgaccaccgacgtgtcgggcaccataccgtcggccagcacccatgtggggccgccgaatgtcagggccagcgcacccaggtagagaccggcgtagcggatggccgtgaaggctcgggttgaaaagggcagaggggacatggctacaaatacctcaggtcaagcacgatggaaccgtccagggggacttcctgcttgagggtcaaataggcggccgcattgatcgacgtgttgacttgcaaggtggccgtgatctggcggtgcggttccggcaccaacgtgccggggtgggcgaaccccatgtaattgttcgggtaggcattggtttccgggaaccaggtctgtccctgattgctggaggccagcactagcacgcgctcgccgtcgcccatcacgtcgcgaaaggcaatggacacggtgccgagtcgctcggtggggacgtggacgttgtggcccaggccgtagtaaaagcccgggcccagggatgagtcggcgcggttgtccaaacccaccaatacaaacagcaccgagtcgttgcagctcacgtccaagtccagggcttgggtgggcaagacactgaactcgaattggttgagcgtgtgtgccggcaccctgccgtggtcgacgatgccgttggccgacaacgtcggtgtacacgcgctgggcgtgatcagcccggtcacattcagttcggtgctggatgccgccagtgcagcgcagccgccactcagcaggcaaaacagggcaagaaggcgtgaagaggtgtgcttcatgggggaggttcaccggttgcctggttcatcgtttcaatacagcgcaacggcaggtgcgatggcctgccgctgtgcgtttcaaagtgggcttacaggtagcgcaccgtgacggtcaccgaaccgtcgatggccacttcgttggtcagcgtcaactggctggccggagcgatttttgggctgacggtcaggtccgaggtcagcacctgcaccgggatgggcgcgtcgacggcggtgtcggccaccgagatcaggttgtcgggcgtcaagttgcgcgcaacgacccaggtgacaccgccgtcgacagaggtgatcggccggcccgccacgccatcggcgaccggcgtgttcaggctgagggtcatggcgccgagcttttgcgtgccgttgatcaggcccaggccgaactccgtgatgtcgtcaccgtagttcgaacccggtcggttgtcgtcggcgtccagggccatgagggtggccgcgtcacaggtgaccgtcagttgcacggtttgctcggtaagcggggtgacctggtcgacattcaagtccctggcggaaatcttgccgtagtccaccgacccactgttggacagggcaggtgtacaggcgctgggggtgatcatgcccttgacggtcaggtcgacgctggaggcagcgaaggcgctggcgctgccgatcagcagggtggcggcgagcagggtattgagggatacattcatggtcagtctccaaaaaaagaaggtaaaaaaagggttaccagtacttgagctgcaacgtcgcgtgcccatcgatgggcaactcgtcgagcagggtcaggccgctggcgggggcgatgatggtgaaggcgcgcaggcgcgcactgagttcggtgatggcaatgggggtatagggtgctcccgctgccgaaaaggcggtcaatgccgcgtgccccaggtaggacgacggtccccagcttgcaccgccgtcacgggacatgatggtctgcaccggcgccgtgtcggccaccggctcgaacaacccgagcgcgacactgcccagcatctggtcatcgttgaccatccccagcccgtggaacaccgggttgatcgctgaggtgccgctgcggttatccaccgtggtgagggtgaagtgggtggcgccttcgcaatgcacttgcagcagcatctcgcccggttgcaggcgggtgggcaggtcgatgtccaggtcccggccggtcagcttgccatgatcgacgacaccgtcattggacaggcttggggtgcatgagctgggcgtaatggtgcccgtaacgctcaggtcggtattgctggccgcgaaggttgcgggggcgcaggcggccagcaggagggcaagtgtggcgcgggttcttctgtccatcggcacgggtccttgtgtgaagagaaaagaggggattacaggtagcgcatttccagggtggccgagccgttgagtagatactcctcggtcagggtcaggccgcgggtggcggcgatgtagccgtagatgagcaggttgctggtcaagttgcggatcggaaccggtgcccaggccccgcctgagtcgtcgccgaaaccggcgagtcgaccacggatccacaatgcgtttggcgagctctggatccaggtgacaccgttgtctcgtgaggacagggtggagatcggcagaccttcggcggtggagctgttcagccccaggtggtaagcaccgatggagcggttctggttgatcacccccaggccgtaggaggtatcgccgccgccttgaccattctccaaggcatgaaatgcaaacaacgttgcggcgtcgcattccacgctcagttgcaggttggcggtcggcaagaccgtggcgctttccacgtagaggtcggcgaaggcaatcttgccgtagtcgacaacgccgcctgagctgagggtaggcgtgcaggcgttcggggtgatcacacccgtgacgttcaggtcggtactgctggcagccagcgcaggggtggctgcggccatcagtaaggtggtgagaagcagggaatgtgggactttcatttgaacaacatattcctgagcaaagtgttggcacgaagggcagtgagtggctcgggtgaggcgctggcgtcgagggttggattgtttttgtgggcgacgacgcgccttctggttgtgttgagccgggacgcatttaacgcccgttcccgacggtggcggaatgcaacaattacgatagtgatgccgccggatgaacctctgcagcgtcgattgaaacggctgacgcgcttgtaagaaaaagtgcttagtcgtagttgttgtatcgccctattacattcattcggatatttttcgcgctctcttaatccgcacagtctgtttttttgaacaggtctgaatgtagttgcgcgaaaagttcgagtgaaatcgtccggcaggtcatcaacctctcaggcgtctccctgcgccaggtgcacgcctggtgagctgatcgctctgcatgaggttgttatgccgggcaatgatccacgtcgtcatccacgcaaggcctcgcactcgactgccgcgccatcccattggcagcaagccagagtcctggtggccgacgaccatgccacctaccggttgctggtggggtcgttgctccaggtgctgggtgtcggccacgaaacctgcagcgacgggcgcatggccttgcaggccttggctgcgcgtcactttgatctggtcatcagcgattgccgaatgcccgtcatggatggttatgccatgacgcgcgaattacgccgacgtgaacgggctgcgggcaggccgtgtgttcccgtcatcgccatgaccggtcgcctgggccgggaagagattcgccgttgcctggaatgcgggatggatgggtggctggtcaaaccggtcagcctgaggcagttgcgcgagttgctcaccgaatggttggcgccaaggccgttgcatgcggagcagcgcaagcagtcgttgccgcgtcgacgcgaagcgctgccttcgcgtgcccgccttatcgcgacctttggttcctggacggtggtagaggcgatgttggcgagcctggtgctcgaggcccgggacgacctggcagtgctggagcaggcgcgcatcagcggggatgccctgttgacctcgcagcgcttgcaccgcctggcgggcagtgtggcgttcctgggggcaacgcgattggagcagcacgccgccaggttgattgaccgcgtgcaggccagcggggtggaggtgaatcggcaggcactcgagctgtttcatcgtgacgtcgaacgttacctgcagcgtttgcatcaactctgaatccagggatttgtaagagttttcatgtatgaagtgtaggaataatctgtatgtaatttctttttattgtgtgggctaaatgttgctctccaataactagggggagtaggaagagccgtccagttatttcaggttgttgcatagggctgagcgagctattttgcatgtattcaaattgccatcatgggtaacgacgatgattcgcataattattgctgacgatcaccccatcgtccgtattgggcaaaaagtggtaattgaagccagtggtaagtgcaaagtcgtaggggaggccaatggtccggatgaattgctggcgctggtgaacagtaccgcttgcgacgccatcgtgaccgactttgccatgccgggcgatcagcaggcggatggctacggactgctgggtttgttgcaccggcaatacccgaggttgccggtgatcctggtgaccatgttcgccaacgtggtcacgttgcgcgaggcattcgcccatggcgcgcgggcgatcgtggccaagagcgcgtctgcacgggagctgcccctggcgctgcgggcggtggtcgaggggcgtacgtttgtcagtgagtgcctgcgcctgcagatggagcagacccaactggcgcatccgtcccagccacaattgtctggcaaggagcgagaggtggtaagaatgctcgccagcggcatgaccgtcagccagatcgccgcgcgggtcaaccgcagtatctcgaccatcagcaaacagaagagcacggccatgcagcggctatgcatttccaccgatgtggatcttttcacctatgcgcggcaaagcggcatggtgccttagttgttgtgcatggcgtgaaagtttcagatttattatgtagttaatcaggatattcgtattacttgtatggggcagtagtgtggggcgagttagtgtgtgttcatgtacccggcagtgataagtcggcggcataactacctatgtccaacacagggtcaggcggaggcgagtgtcttgttattcgacaaggcaagcgtttccgttttgccttgaatgcgagcacttgaataaatgaaacaatcactttcccttgttaccagcgcttttctattgatgggcgcctcgaacttgtttgcggcttccagtattgacctgagtgtcgtgggtgccttgaccccttccgcctgcaccccggctttgtccggcggcggcgtggtggatcatggcaagatttccatgagtgatcttccttttgacgcctacctgcctgaggcgacgctggcgttgagtgtcaactgcgaagcatcgacgctgatggcggttatggctaccgacaatcgccccggtactgcttggtacggctacgacactgatagcgcatttggcctgggactttacaatagccggcggtggggcgggtatcagctcctcgtgaaaaacgtccaggcggacggtgcagcggcaccggcgattgagtccgtggatggcaaaacctggtttcccgcgcccgaagaccaaacctggcaagtgggctggatgcgttcggtgggggcggtcggtgaagttgacgcgctgccggtaccggtccagaacctggcaatggaagtattgatccagacccgcgtcaggaagcctacgggcgctaccgaggaagtccctttggacggcagcgccacgctgagcatcttctacctctgacccaccctcgcttatccaccgggtgaatgagcatggtgtttccgggcgccgcggattatcgtgctggccttatgccgataactgcggagcctgcccatgagtgatgcccacaacgccttgatcaccgagttctacagcgcgttccagcgcctggacgctgaagccatgtcggcctgctacaccgacgatgtggtcttcagcgacccagccttcggcgaactgcgcggccgggatgccggtgacatgtggcgcatgctcaccacccgcgccaaggatttctccctgaccttcgacaatgtgcgcagcgacgaccgtagcggtggcgctcactgggtggcgacttacctgttcagcgccaccggtaatacggtggtcaatgatatccaggcgcgctttgtgtttcgcgacggcaagatctgcgaacaccatgacagcttcgacctgtggcgctggtcgcgccaggccttgggcaccaagggcttgttgctggggtggacgccgctggtgaaaaacgccgtgcgcgcccaggcacgtaaaggcttgaaggcattccaggccagtcgttgataagcttggcaattcctatgccttgccgaatcgatccgtgaatacgcctgaccccaaaccctggttcgtctacctggtgcgcgccgccaatggcgcgctgtattgcggcatcagcaatgacccggtgcgccggtttgcctcgcaccagagcggcaagggcgcacggtttttcctgtccagcccggccgttgcgctggtgtacaccgagcaatgcgcgagcaagggcgaggccctgcgccaggaacgcttgatcaagaagttgaagaagagcgccaaggagtgcctggcggcaagcggctcattgatttgactgatgggttcccatcatgcccgcgccagggtttgcaggctaagctagcgattcacttctctagcggagcctggcatgtccgaattgatcctgcaccactacccgcagtcccccttcgctgaaaaagcccggctgttgctgggctacaagggcttgtcctggcgctcggtgcatatctcgccggtgatgcccaagccggatctcaccgcgctgaccggcggctatcgcaagacccctgtgctgcaaatcggtgccgatatctactgcgacaccgcgttgatcgcccggcgcctggagcaggaaaaagccgcgccggcactgtttccccagggcctggaactggttacccaaggcttcgccgcctgggccgattcggtggtgttttcccatgcggtggcgctggtgttccagcccgaatccctggcggtcaagttcgccaaggtgccgccggaaatgctgcaggtgctggtggcggatcgcagcaagctgttcagcggtggcacggcgactcgggtgcaattggatgtagccaagcatcaatggccggcgattgtcagccgcatcgaccagcaactgcagcaccaggccggggatttcctgttcggcgagccatcgattgccgacttttccctggcccatcccttgtggttcctcaaaggctcttcagtgacgtcgcctttggtagacgcccatcccgccgtcgccgcctggttggatcgtgtgctgggcttcggccacggtacatccactcagatgagcgccgagcaagccctggacgtgtcgcgcaatgcggcaccggctgcgctgcccgaagaactgtttgaagacttgaacggtttcaaggcaggccagcaggtgaccatctccgccactgactacggcaccgaccctgtcgccggcgaattgctgtttgccgggcgtgaagagctgatcctgcgccgcaccgatgagcgcgcgggcaccgtgcatgtgcatttcccgcgcatcggttttcgcatccaggcgcagtagggaaaaatatttgcaaataaaagtgaggtaaatccaccgcccaaccgtgtagtgcttgaaactgcgatctattcgcattaacagcgttttctacacgggttctcacagcatgaagtcagcggcgggcggttgggtaaaacagtggctgggagcctcggcattggcggtatcggggctggcgttgctgcccctgagcgtggtgcaggcgcaggagcagcaaagtgcccagttcaactttgccctggcagccaagccgctgccccaggccctgagcgatttcagccgggtcaccgggatcagcgtgatctacaccgacgaagcgccctacggcatcaaggccccggcggtcagcggccagatgagcgccacccaggccctgcaacgcctgctgggcagttccggcctgaccttccgccagatcgacgcccgcaccctggcccttgagccggcgcctaccgaaggcgcggtcaaccttggcgccaccaccatcagcggtgccaaccagacccaggacagcaccagctaccaaccaccgcccaccagctcggtgatgcgctcccatggcctgctgctggaaaccccgcagaccgtcaacgtggtgccggcccaggtgttgcgcgatcagaccccgcgcaacctggatgacgccctgggcaatatcagcggcattacccaggccaataccctcgccagcacccaggacgcggtgatgctgcgcggctttggcgacaaccgtaacggctcgatcatgcgcgacggcatgcccatcgtgcagggccgcgcgctgaacgccacggcggagcgggtcgaagtactcaagggcccggcgtcgttgctgtatggcatccaggatccgggcggcgtggttaacatcgtcagtaaaaagcctgaactggtccagtccaccgccctcaccgtacgcggctccaccttcggtgacggcaagaacggcagcggcggcagcctcgacaccaccggcccgattggcgacagcggcctggcctatcggctgatcgtcgatcatgaagatgaggattactggcgcaacttcggcacccaccgcgagagcctgatcgcgccgtcgctggcctggtatggcgacagcaccaaactgctgttcgcctacgagcaccgcgaattcctcacgcccttcgaccgtggcaccgccatcgacaaatccaaccacccgctggacatcccggccacacgtcgtttggatgaaccgttcaacaacatggaaggccgttccgacctgtaccgcttcgaagccgaccacgacctgaacgacgactggaaagcccacttcggctacagctggaaccgcgaaacctatgacgccagccaggtgcgcgtcagtgcggtgggtaataatggcgccctgacccgcaggatggacggcaccaagggtgcgatcaccactgaccgctttaccaccgcgagccttgaaggcaaggtcaatgtgttcggcctgcagaacgatctggtgtttggcctggatgatgagtaccgcaagatctaccgggctgacctgattcgccagaactcccgtggcaccttcaactacaacaacccggtgtatggcaacgaagtggcgggtactaccgtcagccccgccgacagcgcccagaccgacctgctgcgcagcgactcgctgttcttccaggatgcgattcacctcaacgaccaatggatttttgtcgccggtgcgcgctaccagatgtatgaccaatacgcgggcaagggcgtaccgttcaaggccaacaccaacggcaacggccaggcctgggtaccgcgtgcggggctggtgtaccgctacaccgacgagctgtcgttctacggcagctacaccgaatcgttcaaacccaactccaccatcgccgccttggccgatggcagcacgctgaccggcgacctgacgcccgagaaatccaagtcctgggagctgggcgccaagctcgacatccccgggcgtatcaccgccagtgctgcgttgttcaacatcgacaaacgcaatgtgctggtgtcatcggaagtggctggaagcaccatctatagtctggctggccaggtgcgctcccgtggcctggaactggacgccaccgggcaactgaccgacaagtggagcgtgatcggcagctacgcctacaccgacgcggaagacaccaaggacaaggacccgaccctggaaggcaaccgcctgcagaacgtggccaagcacaccggctcgctgtcggtggcctatgacttcggcaatgtgttcggtggcgatcagttgcgggtaggcaccggcgcgcggtatgtcggcgagcgagcaggcgatgccgccaacgacttcaccctgccggggtataccgtggcggatgcgtttgccacgtacgacaccaagatcgatgggcagaaggtcaagttccagctcaacgtgaagaacatgttcgaccgcgtctactacacctcggcggccagccggttgtttgtgtccatgggcgatgcgcggcaggtgtcggtgtcgagcacgctggagttctgatgcgcctattgtgtggcgagcctgctcgccacagggggagggagctgttagcgttgctgccactgacagctttaggaaaacgctactgatgtactttggaaaatggatacccaccagcgggctgctggtgggcttgagctttttgctgggtggttgcgcgagtgtttcccagacgtccaccccaaccatcatcgaccaattgatggccgacccggccctccatggcgccactgtttccctgatggtgcgtgatgcccgcagcggcaacaccctctatcaacacaacccgcgaacccgcctgattcccgcatccaatctcaagttgctcaccaccgcagccgcgatggatgtgttggggccgcagtatcgtttttccacgcaactgttgagcaacggcacgcagcagggcgagcgtctcagcggcaacctgtacctcaagggcctgggcgatccgaccacgcaattcgccgactaccaggcattggcggcacagcttgcagccctgggcgtgcgtcaggtccagggtgacctggtgttcgacgatacctttttcgacgccgaacgcttgggcgtggattgggcccaggacgacgaaagcacctactacggcgcgcagatttcggcgttgactgtgtcacccaatgccgattttgatgcgggcacgctgctggtcacggcgaaggctcccgccgtggtgggtcaaccggtcagcgtggtggtgagcccggcaaccgactatgtgcaagtgaacaaccgcgccgtcagcggccccggcaacagctatggcattacccgccagcacggcaccaacctgctgcaactcagcggtgcgctggccccaggcaagcaaagccggcagtgggtgagtgtgtgggagccgacgcaactggtggccaacctgtttgaacaggcgctggcgcagcagggtatccaggtgctgggccgtcgtgtgataggcagtgcaagtccagcgacggccaaggtgctggccgaacatcagtcggcaccgttgcaggaactgatcacgccgctgctcaagctgtcgaacaacaacatgtccgaagccttgctcaaggccatggggcgcaagacgtccaacgcaggcacggcacaggcgggggttgctgcggtgggggacttcatgcggcgccagggcctggacccgatgacgctgagccaggtcgatggttcgggtctgtcgcggcgcaacctggtgtcttcccaggggctcactgatttgctgctggcgacggccagacagccctggttcgacgcctggtacaacgccttgccgattgccggcaacgccgaccgcatgaccggtggcagcctgcgctaccgcctgcgcgggacggctgcgcaaaacaacctgcacgccaagaccggctccatggccggtgtgtcgtcgttgagcggctacatcaccgacgccgagggccggcgcctggtgttttcaatgatcagcaataactacctgagcaccgccgcaccgatccgcgccctggaaaaccgtgtggcgctggccctggtgcaatggcacgactagctcagggctgataacccatacgccaactcacagcccggctcgccgccagcaagcgctgcgccgccgggccgtcttcatcggcgtggaacaacgaggtggggccgaccacggtcatcaccgccgccacctgcccgatggcattgaacaccggcgccgacagcgcatcgacaccgggcatcagcaaaccatgcacaaaatgcaggccacggctgcggatctgttcacaggtggtggcgtaggcctggtcgtccgccagagcgtgggcgatgccggcctggatctcacgctcgcgcagctcaacggtttcccgcgacggcaggaaggcgctgaacaccagcccagtggatgaactgagcagcggcagcaccgagcccagttgcgttaccaccgtcactgcgcgcactgctggttcgatctgcaccacggtcgcgccctggttgccccacactgccaaaaagcaggtttcattcaattcatcgcgcaactccgccaggggcatggcaccgactttcagtacgtccatgctgcccagcgccgccaggccaacccgtaacgcttcgcggcccaggccatagtggttggtggcggtgttctgttcggcgaaacccgaggcgatcagcgcctgcagataacggtgcaccttgctggctggcatctgtacatgttcggccaggcgtgacagcgacgttgccggggacaactcggccagggccttgaggatatcggtgcccacttcggccgagcggactttctgtttaccggtgtcgcggggcttttccatggaggggcgagaatccgagagatgaatgggcgtctttatagcttgacggtcgatagtgatcaaattacgttatgcgtaactggattacgataaaaacaacttccgtacagaggatgatccatgaacctcgaatacctgtcgggcttcggcaatgaattcgccagcgaagccttgcccggcgccctgcccgtcggccagaactccccgcaaaaagcgccctatgggctgtacaccgaactgttctccggcaccgcgttcaccatggcccgcagcgaagcccgacgtacctggctgtaccgcatccagccgtcggccaatcacccggcgtttatcaagctggagcggcagttggccggtgggccgttgggggcggtgacgcccaatcgactgcgctggaaccctttagatatcccgagcgaggcgacggactttatcgatgggctggtaaggatggtggccaattcgggttcggaaaaaccctcgggcatcagcatttataactaccgcgccaaccgctccatggagcgtgtgttcttcaacgccgatggcgagttgttgattgttcccgagcaaggccgcctgcgcatcgccaccgagcttggcgtgttggaagtggcgccgctggaaatcgttgtgttgccccgtggcctgaagttccgcgtcgagctgctggatgcgcaagcgcgcggttacgtcgccgagaaccatggtgcacccttgcgtttgccggacctgggtcctatcggcagcaacggcttggccaatccgcgtgatttcctgacgccgattgcccactacgaagatgtgaagaaacctacaacgctggtacagaaattcctcggcgaactctgggcctgcgagctggaccattccccgctcaacgtggtcgcctggcacggcaacaacgtgccgtacaaatacgacctgcgccgcttcaacacgattggtaccgtcagcttcgatcacccggacccgtcgatcttcaccgtattgacctcgcccaccagtacccacggcctggccaacctcgacttcgtgatcttcccgccgcgctggatggtggccgagaacaccttccgcccgccatggttccaccgcaacctgatgaacgaatacatgggcctgatccagggcgcctacgacgccaaggccgaaggcttcctgccgggtggcgcatccttgcacagctgcatgagcgcccatggcccggacggcgagacctgcaccaaggccatcaatgtggaactggcgccgcacaagatcgataacaccatggcgttcatgttcgagaccagccaagtgctgcgcccgacccaattcgccctggactgcccgcaactgcaaccttcctatgacgcgtgctgggcctcgctgcctgccaccttcaacccgaaccggagataacccatgactcagcccacacttacccgcagttgggtggcctccgccaacggtcacaccgacttccccctgcagaacctgccgctgggtgtgttcagcatcaacggcgcggcaccacgcgtcggtgtggcgattggtgactcgatcctggatttgcatgccgccatcgacgaattcagtggcgaggcccgccgcgccgtcgaggccaccgctggtggtcaactgaacgccttgtttgaactgggccgtggcccgcgcgtggccctgcgcgagcgtttgctggagctgctggccgaaggcagccagctgcaaacccgcgaggcgcaggtactgcaccgcgccgccgattgccagatgcacgtaccggcacggatcaacgactacaccgacttctacgtcggcatcgagcacgcgcagaacgtcggcaaattgttccgtcccgacaacccgctgctgcccaactacaagtacgtgccgattggctaccacggccgcgcctcgactatccgcgcctcgggcaccgacgtgcgccgtcccaagggccagaccctgccggccggccagaccgagccgaccttcggcccgtgcgcacgcctggactacgagttggagctgggtatctggatcggccagggcaatgcgatgggcgattcaatcgccatcggcgacgcggcggaccacatcgccggtttctgcctgctcaatgactggtcggcgcgggatatccaggcctgggaataccagccgttggggccgttcctgtcgaaaagcttcatcaccacgatctccccatgggtggtcacggcggaagcacttgagccgttccgcaaagcgcaaccgccacgccctgaaggcgatccgcaaccgttgtcgtacctgctggataaacgtgaccaggctgccggtgccctggatatcgaattggaagtgttgctgaccaccgccgcgatgcgcgaacagaagctgccggcatttcggttggccctgagcaacagcctgcatatgtactggaccgttgcgcagttggtggcgcaccacagtgtgaatggctgccagttgcaggccggtgacctgtttggttcgggcaccttgtccgggccgcaggcgggccagttcggcagcctgttggaaatgaccgaaggcggcaaaaaggcggtcgagttgccgtctggcgaggtgcgcaaattcctcgaagatggcgatgaaatcatcctgcgtgcacgctgcagcagggaaggctttgcctccatcggcttcggcgaatgccgtggcaccgtggtcgcggcgcgctaggagggcagggcgatggaactctacacctactaccgttccacttcgtcgtaccgggtgcgcattgccctggcgctcaagggcctggatttcaccgccgtgccggtcaacctgctggtaccggcgggcggtgccaatcgccagcccgagtacctggcgatcaacccgcagggccgtgtgccggcgttgcgcaccgatgagggcgagctgttgattcaatcgccggcgatcatcgaatacctggaagaacgttatccacaggcaccgctgctctccaacgatctgccgacccgagcccatgaacgggcggtggcgtcgatcatcggctgcgatattcatccgctgcacaattccagtacccagaatctgctgcgccagtgggggcatgacgaggcgcaactgctggaatggatcggccattggatcagccaggggttgggtgcggtggagcagttgatcggcgacacagggttttgcttcggcgagcagccggggctggccgatacgttcctgattccccagttgtacgcggcggaacgcttcaaggtgccattggcggcgtacccgcgcatcgggcgggtggcggcgttggcggcgcagcatccggcgtttgtgaaggcgcaccccgccaatcaacctgacacgccttaggacccaatgtgggagggggcttgcccccgattgcggtctatcggcaatgaatgcgtcgacggtgccaccgtattcgggggcaagccccctcccacattttgactgcgacacccttataaaaataataggtaccttgcgatgcacaatcagattgccagctttcgcgcggcactcgacgcccgtccggtgtcgcgctatcagtggttgattctcctgttactggcgctgctgctggtgaccgatggctacgacgcccaggtcctgggttatgtggtgccggcactggcgcaggattgggggttggagaaggctgccttcggcccggtgttcagcgccaacctgctcgggctgaccttgggctcgttgctggtcacgccgctggcggatcgtttcggtgtgcgtcgtatcctgctcggctgtgtgctgatctacgccaccctgactgtgctgatggtgttcgccaactcgctgaccacgttgatggccgcacgctttatctgcggcattggcatgggcggcgccatgccgagtgcgatggccttgatgtcggactattccccaccacgcctgcgcaccttgatggtgaccttggcggcttgtggtttttcgttcggcggggcggcgggtgggtttgtggcggcggggtttatcgaaggctttgggtggcaggcggtgttcctcgccggtggcgtgacgccgctgctgctgttcccgtttctgatgtggctgttgccggaatcattgccgcgtctgctgcgagacgcaccgccttatgcgcggctgcaaagcgtgacgttgcggatgttgccgggctggcaaccgccgctggccactgaggcggaaaaccaacaggagcagggcagcaaactgacggtggtggagttgtttcgcaacggctacgcgcgcccgactgtgctgatctgggcgaccttttttgtcagcctgatcctgctgtatttcatgattagttggttgccatcactgctgctggaaagtgggctggcattaaaagaagccaacctggtgacttcgatgttcctgttcgccgggaccttgggcgctatcggcatggcctggttcgccgaccgtttgaaaaacaaagtgcgtctgttgtcgggcgtgctggcggctgcggcggtgtgcaccatcctgctcggtgtgaaccatgacaacccgcgttacctggtagcctgtgtgtttgcggccgggttttgcatcatcggtgggcaattgaccctcaatgcctttgccagcaatttctacccggcacatgtgcgcgccacggggacgggctgggcgttgggcgtggggcggtttggttcaatcctggggccgttgtttggcagtatgttgctggcgatgcatatcccggtgcagcagattttcttcttttgcgcgatcccggcggtggtggcggcgttgttgatcattcaggtgcgttcgcctggggttggggcggcgaagagcccgttgcccggcgacattttcaagacaccagccaatcactgacgcgggcttcacggcgagcgcccttgttgtggcgagcgggcttgccccgcgttgggtcgcgaagcggcccctgaattgggcctgctacgcagtccaacgcgggacaagcccgctcaccacagaaagaaatgatctcttggaattcgtgtgttcagtgcaccactgaattgggcggcaaatgccccaggcgttcggtcaggcgcaggcgctggatcgggtcttcgctgagcatcagcgcgtgttccaggtcgaaacgctcggcgttggggcagtccaggcgctggtacaggctggcccgtgccaggtaatcggcggcgctggcattgcccagttccagcacacgttcggcgtcgaccagtgcctcgagcggggcgtcgttggacaggtgcaattgccgcaggttacgtgacagccgctgcaggatcgaacgcgggtcggcggtgtgcaggtggtcggcctgcagcttgaggttggggccgtactggcgttgcagcaggtcgcggcaatcattggggtacaggcgtcggccgccgcacgggtccaacaggtgatcggcaccgggtacgcgcagcaggaaatgcccggggaagttcacgccgaccatgggaatatccatccgtcgcgccagttccatggcgatcagccccatcgccaggggttgtccgcgcttacgttgcaacaccttgtccagcaaggctgccgcggggcgcagcggagtgaattcatcctgggcaaagcccaggtcattcaggcgccgcagcagcggttgaccgagttcatccgccggcagcatgggcatgccgatgctcacctgttgttgcagcagcgtcagttcttgcatgacaactgacggctgcaccgccgggtcatgctcggcagcaatccacagcgccgcttcaaacagcgcgggcggggagcgttccaggcaggcgaaaaaggctttgcgggggttcattgcattctccggcggatgcccccgttttagccttgctgggaattttcgtccagtggcttgggaaatatcctgcgcgcttatgtcgcaagtcctacgaaatcgaacggcttattccagcgtattccggcagttttctaccgcaagcctatacttggcccactaccagaagtgactcgggagcttgacgatgtttgctctcatgcacagcacccgccttgaatcgctgcacttgagcgtcgacccggtcaccgggctgaaggcggtcattgccatccacaacagccgcctggggcccgccctcggtggctgtcgctacctctcctatcccgacgacgaaagtgccgtggcggatgccgcgcgcctggcccagggcatgagctacaaggcggccctggccggtttgccggtgggcggtggcaccgccgtgatcctgcgtcccgcccatgtggaaagccgtgctgccttgtttgaagccttcggccgttgcatcgaacagctcgacggacgctacatcacggccatcgacagcggcacttcggtggccgacatggactgcatcgcccagcacacccgctacgtcaccagcaccaccgccgcaggcgacccttcgccccacgccgccatgggcgtgttcgccggcatccgcaccaccgccatggcgcgcctgggcagcgacaacctcgaaggcttgcgcgtcgctatccagggcctgggcaacgtcggcttcgccctggccgaacagctgcacgcggccggcgccgaactgctggtgagtgacatcgaccacggcaaggtgcaactggccatggagcaactgggggcgcaccccatcgccaacgacgccttgctcagcacaccgtgcgacatccttgcgccctgcggtcttggcgccgtgttcaaccgccagagcgtcggccaactgcgctgcgccgccgtggccggttctgccagtgcccaactgacccacctggacaacgccgatcaactggaggcgcgcggcatcctctacgcaccggactacgtgatcaactcgggagggctgatctacgtcgccctcaagcacagcggtgccgagttgccgtccatcaccgcgcacctgtccaacatcggcacgcgcctcaccgaaatcttcgcccacgcccaggccgaaaaacgctcacccgcccgcgtggccgacgaactcgccgagcgcctgctttaccaatagccaggtattaaaaaggccctgaaccaaagattcagggcctgttcaattcgggctttattccgccgctgcgttcagcaactcggacaacgcgtccggctggctcttgaacgccttggcaaacacatcgcggttcttcgccatgtagatcccggcttcttccacctgctgctcgctcagggacggcacggctttttgcaacacttctgcgagcaactcagcgagttcaagcatcttgtcatgacggtcagcttcggctttatccatgaacaaacgctccagatctcggctgctgcggtataccacttcgacggccattcaccacctcacatgccttcacgatagttgtcttttgcgactactgtatttatatacagcgaaaagggtaagccaaaccgtggggtttgggtagcagttttttaatgtagtcgggaaatgggggtttgctacaacggaaatttctgacaacttgccggggttgcgctggaattgtccggcggcttaccttcctcgggcgctgcattggcagcgaatgggcttggcggcccaacaaggaagcgcaacaaccctctatgagatacagatgcttttttgcatttgtattcttatgtcatggcgggttgcgcatggacccctcggggtgccgggtcgttccttaccggtccgccaaccttgtgcaatccgtcacccaacctgcttggcggcagacggtgatggtttctttactaaggaactagaccgatgaagaaaatcactcccaaccctccgtctatcgattcgacgctatttcgcgttacacctgaagctgacacagaaacattactggccaacgccagcgaaactctaagcagcgcccgtgaaatggccactacgctggcattcgaccttgacggtccgcagcggagtctagtgttagccattcaccaattggttgagataggctgtctgttagtcgaccgagcgttagagaaagtcgcaccagtttgatgcttcgccctctgaccgctcccgcggttgcgggagcggtcaaaacatggtctcggtggcttcgattttttctgttactcacttgatcgctcagaacacgacagcgaaaacgccagcgactagactccttcttcatcgacaacggaggcttttatggacacttccttttcctctggtacccaggcagataccgaagagcaggccgatagctacgaccgctggtttcgcgccaagatacaagctgctcttgaagacaccagccccggcattcctcacgatgaggtgatggccgagatgcaagcgctgatcgagtccaaactcaagaaaggcgatgctgattgagtgggtgcccgcagcgcgggtcgaacttcggcaaattattgaatacctcaatcatcgcaatcctgtagcagctcttgagctaaagcgctcaatcgaagcttcagttctggctctctcccgcagaccccatctttaccgtcctggcagaatcctcggtacgcgcgagatggtggtacatccgaattacctggtcgtttacaaggtgacagacaacattcgggttctctctgttttacacgcacgccagcgatatccctgaccgatccgtacttcggatgagcatagtttctactctgctcatccttatacgtgtctcatgtcaccccgccatcatcttatacccgcccctggccttttttctgcatgcagaacaaccgtcacgtccaacccgcattatccggtcgagtcgacctaaggaagcatcatcgtgaaaatcaactgggccgaaaggctgcgccagcaagtacacgggctggccgagtccctgggtaacctgttcgtcgagtcgttccactacctggcgctgttcgccattggtgcggtgacggcctgggcggcggtgatggagtttctggggatgctggagaacgggcacatcaagatcgatgacatcttgctgctgttcatctacctggaattgggcgcgatggtggggatttacttcaagaccaaccacatgccggtacgcttcctgatctacgtggcaatcaccgcgctgacgcgtctgctgatctccaacgtgtcccaccacaacccgccggatgtaggcatcatctacctgtgcggtgggattctgctgctggcgttctcgatcctggtggtgcgctacgcctcgtcggcgttcccctccgtgaaggtcgaaggcccgcgtcgcaagggcgaggcgagcctggaaaccgagaagggcgagctttaaagcccgacgctgaagggcagggtgcgggtaggcggccgctggagcactttgtggtcgccatccgtcatcaccgtgaggatgtccaaggcgctgtgcccctgttcgatggcaatgccgaactggatgctttgcaccaggcgcttgagtcgctttggatcgttgcgttgttcggcgctgatcatgcgtttggccaccacgccttgttcgttggagagggtcagcatgatgctgccgtccaaccgttggatgctcaggttgacacggtattcgggcgtgaaggtgtcggtgatgatctgaaaagggttgtccatggtgcgttaccgcctgataagaacatgcagtcattgacgaccggtatcgggattagttcgcgttgcctgaccaccggccactccgtcgctgaggtttcacaaggtccgtttgcctccacagctgtacagcaaaggccgtgccgtgcggcgctcgtatcccaatgtgggagggggcttgcccccgatagcagtgtgtcagccaatgaatgctcggctgaaagaccgctatcgggggcaagccccctcccacagttgtttcgggttgtgcttgaggtgggtgacctgtttcagggcagtaccgagaaaacgatcgcagacagcgcaatcaagccgatcaccaccacaaacaggttcgacagctggcccgaatactggcgcagagctggcacgcggcggattgcatacatcggcatcaggaacagcaggcacgcgatgatcggcccgcccatggtctcgatcatgcccaggatgctcggattgaaggtggccacggcccagcaggtgagtaccatgaacagcgcggtgcagcgctccagccatttcgacgacatcgaacggttacgaccgcgcagggatttgacgatcatgccctgaaagccttcgctggcaccgatgtaatggccgaggaaggatttggtgatggccaccagcgcaatcagcggcgcggcgtaggcgatcaccggcgtctggaagtggttggccaggtacgacaggatcgagatgttctgcgccttggctgctgccaggtcggccggcgacagtgccagtacgcaactgaagcagaagaacatcacggtcagcaccatcatgccgtgggcggtggccaggatgccgctgcttttacgctcggcctgggcgccgtacacgcgtttctggtcgacggcgaaggcggagatgatcggtgaatggttgaacgaaaacaccatcaccgggatcgccagccacagggtcttgaagaatatcggcaggggcatgccctcgctggcggaagcgaagaacgcgccgttccagttgggaatcaggctgattgccagcaacagcagcgccgcgacgaacgggtacaccagcacgctcatggccttgacgatcacgccctggccgcaacgcacgatggccatcaggccgaggatcagcaccagcgacaggatcgcccggggcggcggggtcatgtgcagttggtgttccatgaagctgccgagggtgttggtcagcgccacgctgtacaccagcaggatcgggaagatggcgaagaaatacagcagggtgatcagcttgcccgcgccgatgccgaagtgctcttcgaccacttcggtgatgtcgccggatttgcctgacagcacaaagcgcgtcagcccacggtgggcgaagaaggtcatcgggaaggccagcagtgccagcacgatcagtggccaaaaaccgccgacgccggcattgatcggcaggaacagggtgccggcgccgatggccgtgccgtagaggccgagcatccaggtggtgtcatgttgggtccagccggtggtcacggttgcttctacagcagggttttctacggcaggtgtacgtacatcggtcatcgttattgcctcgttattatttttgcgcgggctcacgttggggcaggtagcagtgctccgatcagcactccacccagctgaccgccaggccgccccgtgaagtttctttgtatttgtcatgcatatcggcgccggtatcgcgcatggtgcggatcacccggtcgagggaaatgaagtgtttgccgtcaccgcgcagggccatttgcgtggcgttgatcgccttgacagcggcgatggcgttgcgctcgatgcatggcacttgcaccaagccgccgaccgggtcgcaggtgaggcccaggttgtgctccaggccgatctcggcggcgttttccagctgctcgggagttgcaccgagcacgtccgccaagccggcggcggccatggcgcaggccgagccgacttcgccctggcagccgacttcggcgccggagatggaggcgtttttcttgcacaggatgccgacggcggcggcagccaggaagaaattgaccacatcgtcgtcggacgcgtcggcattgaacttcatgtagtaatgcagcacggccgggatgatcccggcggcgccgttggtcggcgcggtgaccatgcgcccgccggcggcgttttcttcgttgacggcgagagcgaacaggttgacccattccatcgccgacaaggtggaggtgatgacattcggcttgccgatttccaacaggctgcggtgcagtttcgcggctcggcgcggcacgtccaggccacccggcaggatgccttcatcgcgcaggccttgctccacgcattcgcgcatcaccgaccagatatgcagcaggccgctgcgaatatctgcatcgctgcgccatgcgcgttcgttggccatcatcagttcggaaacccgcaggccgtgcttgttgcacaaggccagcagctcgacggcgctggagaagtcgtagggcaattgcacatcgctggtcggcgcaatgccagaggctgcctcggccgcttcgataatgaaaccaccgcccaccgagtagtaggtctgctcgctcagcaggccgttttcaccgtaggcatgcagggacatggcgttgggatggtagggcaggctttcgtccagcagcaggaggtcggtgtgccagttgaaggcaatctcctgttggcctgcgagcaataggcggccggattcgcgcagttgctggatacgggcattgatcgaggtgggatcgacggtgtctggccactcgcccatcaagcccattacgcaggcgcggtcggtggcatggccgacaccggtggcggacagcgagccatacaagcgcacctccacacggtgagtgtggttcagcagttgttggtcgatcagggcctgtgcaaaggtcgccgccgcgcgcatggggccgacggtatgggagctggaagggccgatgcccaccttgaatagatcaaatacactgatagccatgctaaagccttacaagcaatggagtaggaatcgctgccatgttttgtaggacgagcgcaattggcgcgatactgagcctctagcacggcactgaccaacgaattatcctaagacaccctttagcaggactaaacgctatgacccggccccttcatggccagacgtatgtctggctgcacgttttttcctgtgcagcgcggcacctgtcgttcacccgttgcgccgaagaactgcacatcacaccgggcgcggtgagccagcaaattcgtcagttggaggagcgattggggtttcgtttgtttcatcggcgcgcccgtggggtggagctcagtgccgaggggcagcgcctggccgcgacggtgggtgaggcctacggcagcatcgatgccgaattgcagcggttggacgcgggcatgatcagcggcaccctgcgcctgcgctcgatcccgtcgtttctcggcaagtggctgaccccgcgtctgccgcgcctgcagcagcgctttccggatattcagctgcgcatggtcgccgaggacagcagcatcgccctgcacgagggcgacttcgacctggccatcgacttgaatgacggcagttaccccggcctgttatccacagccttgctcgacgagcagattttcccggtgtgcgcgccgagcctgctgcgcggtcgcccaccgttgcatggtccggccgacctggtgcatttcccgctgctgcatgacatcaccgcctggcgtgggagctatgagtatgcggagtgggagttttacctgaatgccatcggctaccacgacgccgatgtgcgccgtggccataccttcaaccgtaaccacctgaccattgaggccgccatcgccggcatgggcgtggccatcgcacggcgtacgttgcttaatgatgagttggagcgcggcaccctgatcgtgcccttcggcctggctgtgcctaaccataaacgctacgtgttgctgtatgcgccgggtgcgctgagccatccgggtgtgcgtgcggtgcatgattggctggtggaagaagcggagatctttcgcggattgcacccgttgggagaggggcaattgtgaggttagctgtgcgtaagaagatgtaactaactccccaccctaacagcgtttttgctcgtagtcagacttaatttgtaatgtgggatttatctttgcaaaggggttgaattgttctgcggactgctcaattgtgtaatcaagaggtcatggtttcaccaccccggtgtcgcagttgtgacctctcgcgagctagctgaaataagggaagaactatgcaaatccaagtcaatagcgataaccatattgaaagcagcatccgactggaggagtgggtacgtactaccattgagagcacgctcgaacgctacgaagaagacctgacccgagtggaggtctacctgcgggatgagaacggcgacaagcccggtccccacgatttgagttgccgcctggaagcgcggccaaaaggccatcagccgctgtcggtgctgcacaaggccgataccctggaacaggcgatcgacggtgcggcgaccaagctggaccatgcgttggaacatctgtttggcaaactgcaaggcaagccgcgcgctgccgggaaaagccagccgaccaccaaagtcaatgaagatgagctagagcaggagtttctggaaaaagaacgtgccgtgttcaacggctgataactttctcacgctccactaagaacgggcctgcatttgcaggcccgttttcatttactgcccgcgtcggaaaaagtaccggctcgatagcgccagcccacaggcacccaaccctgcaaacagcatcgcccagccggcaccatgacgcagtgcggcctgggcctgcgcgacgctcacccccggtacatcgagcttacccgccgcgatgttctggctgatgcccggccaatccagcgccgtggcgcccggcagcacattggccagttgagcgctgatccccagcaacagcaccaaccccatcaacgcgatgttgagcgccagggtaatcagccgtgcgctcaggtcgatgcccgaggccatgccggcgcggtccgccgacaccgagcccgtggtggtgttggtggtgggggagttggtcagtgccaggcccacgccggcaatgatgcaactggccaggatcagcaggatgctgggttgcgccgcccgattggcggcggccatggccaggaaacccgcacccatcaaacccaggcccaacgggatgatgcgctcggcgccgtagcgcagggccaggcgctccgccagcggcggcaccagcagcgtgggcagggtgtaggcgagcagggcgccgccgctggtcagcgtgtcgtagcccaggcccgcctggaaatacagcggcaggtagatcatgaacggccagaagctgaagttcatgccaatggaacccatcaaggcgccattgaagcgctggatgcggaacaccgagaagtcgaacatcgggtgggcgctgcgtcgctcaacgacgatgaacagcagcaacccggccaccgccagcccagcccaaccgagcatgatcggtgtgccaaaaccgttctcggtgccctgggtgatgaaatagaccagcgcgaacactgacagcgtcaaggtgagcataccggcgatgtccaggcggtggctggccgggtcgcgggattcctgcacgctcacgtgcagcagcaccagggtgaacacggtgagcggcacatgcaccaggaacacccagcgccagtccgctaccgccaggatcaatgcgcccaccatcggcccgaagcccaggcccacgccagcgatcacgccccagatcgcgaacgcccgtgcccgcgccgccggttcgcgaaacaggtgcgacagaatcgcgaactggcaaatcatcatcgccccggcgcccacgccctggacgaagcgtgcggcaatcagcgtcggtgcatcgtttgccagcccgcacgccagcgaagccagcccgaacaaccacaggcacagcaccagcatgcgcttgcgaccaaagcggtcggccagggtgccggcggccatcaacacgctggtgcaggccagggtgtaggcattcatgatccattgggcatcctggaaacccgtgcccagttgctgttccagtgtgggcaggatcaccggcacgctggagatctccaggccgaacatcagggcgacgagacacacggcggtgagggcgaggccgtttctggcggagcggggtgggttggcggccgataacgtggcggcgggttgcatgggattctcctgaggttgagggaccgttggattttcaggggaatctgtttctttattcgtgataagttttccgtcaataagggaatcaagagcgacaattaaatcatggccactgcgcgtttcgatggcgttgaactctttttgcagatcgtcgaaagcggcaacctgacggaagccgccgaacgcctgaacctcacgcgctcggcggtgggcaagggcctggcacggctggaagcgcggctggggacttgcctgttgcagcgctccactcgccgtcagcgtctgacggaagacggacaggcgtactacgagcattgcctgcgcgcattggctgaacttgaagccgccgaatcggtgctggaaagcggccggcagcagccacgcggtcgtctgcgcgccagcgtgccgctggccttcgggcaccactatgcggcgcccgcgttgtgggggttgatggaccgttatccggaactggagatcgaggtgtgtttcgctgatcgcatgaccgacctggtgcaggaaggctttgatatcgccgtgcgaatcggccctttgcccgacaccgaccgcttgagtgcacggcgcctgggtgaacagtccgttggactggctgcttcacctgcgtacttgcagcgggtggggcggattgaatcggccgacgaccttgccggccatcgcggcattgcctaccgcagcaacacgccgcaccgttcgcgggttgtgtcgccattggtgctggacgatctccaggccgtggcggacgctgctatcgcgggcgtcggcctggcctggttgcccagttggttgattgcacactatgtgctgcgagggcagttggaagcagtgctacccgcctaccgtgagcaaccctcgccaatccacgtgatctggccaaccgccgcgcatatgccggccaaaacccgctgcgccatcgacgccttggtcgcagctacccccagttgcctggcgggcagttagaagcagacggtgggggatgagcagtgtccattgtggcgagcccgctcgccacaacaaatctgctcaccacagggagtgcttctcgcgcagttagaacgcgatcgaggtctgcacgtacaccgtgcgcggttcgccgacgtacttgcccttgttgttgtcgtcgaacgagcgcgtgtagtactgcttgttgaagatgtttttcacccccaccgccacattcaaatccgacagctgcgggccgaagtcatacgcggcgcggctgctgaacagcatgtagccggggatgcggccattcgcgccgtcggcgctttcggcctgggtgttggcattgtcggcgaactggctgctctggtagctgctgtccaggttgagcttccagcgaccctcggtgtaacccacgcccagggtgcctttgtgcttggacgagaagggcacgcggttgcctttgttcgggccgtcctcgcggatggtggcgtcgacataagcgtaggtggcgtacacatcaaacccggccagtgcagggctcaagccatcgagcgcgtagttgacgctggtctcgataccctggtgacgggtttcgccacgggcgatcaccgagtcgttggtctggttgctttcgtactggttgtcgaagttgatcaggaacgcgccgatttccgcacgcaaggtgccgtcgtcgtagcgggtgcccagttcccaggtacgggctttttccggcttcacttcgccgctggtcacgcggttgggcatctggctgtactgcacgctgccgaacgaaccttcggtgttggcgtagaggttccagttgtcggtgaggtggtaaagcacgttcagtgcgggcaacgcggtgttgtagtcgcctttgtacttgacgtgggtgaggttgttggtttgctgggactcgatcatctcgtagcgcacgcccggggtgatggtccacttgccgatatcaatccggtcgtcgatgaaaaatgcgttggcttcggtgccgccacgggtgtcgcggtcgttgcggctgttggtggtggggatctgctggttggcggcaatcggcgtgcggtagcgcagttcgtggccggcttcgttgatgtagcggtagcccacgcccacttcgtggctggtcgggcccaggtcgaagccttgggcgaagcgggtttccaggccgcgtacccagtactcgcgtggggatagcgagaggaaggtgccctggtccaggtaaccgctgcgcagggtcttggtgaagaagctgtttacggtgaactcgcgacggtcctgctcatagcggtagccgacgttgaacatcgtacggcggccccagaacttgtcgtaggggcgggtggactggtacggatcggccttgtagtccgcaacgttcaacccccctggcatatcggcctggccttcgtagtactgcgccatggcgttgaagctgttggcgtcgtcgagctggtatttgcccttgaggatcaggtcgtcgatgcgcgtgttgctgttctcgcgccagtcgccgccacgggtgccggagtacagcagcgcaccgccaaggccgttgtcggccgtgccgccggccagcaggttgccggtggtcttgaagccgtcatggctggaggaggggctggtttcggtctgcaggccgcctttgacggtaggcgcatccggaatcgcgcgggtcacgaagttgaccacgcccccgacgttctgcgggccgtagcgcacggcgccgccgccacgcaccacgtcgacggcatccatgttgcccatgctgatcggcgcgaacgacagttggggttggccgtacggcgcaaacggcaccgggataccgtccatcagtacggtggaacgcgaggccaggcgcgggttgaggccgcgaatgccgaagttcagcgccatgtcgtggctaccggtgccgttgttgtccggggcgttgacgccggggatgcgattgagcacgtccttggcctgggtggcgccttggcgttcgaacgcttcgcggcggatcacatctcgggcgccggggtgttcgaacacgttggtctgtgctgcgtcgccgagccagtcgccgaccacgctggaggtgcccaactcgatagttgccggtgcactggccggttgcaggctgtaggcgttgtcgccttcggcgcgggcttgcaggccggtgccttccagcagtttctgcaggccgtctgcggcgccatagttacccgacaaaccacggctctgcatacctgcggtgacttgcgagccgaaggaaatcagcacacccgcttcacgtccaaattgattcaacgccgcttccagcgaagtcggcgcgatgtgatacggcttggcatcagccgccatggcgtgtggcagtaccgtaagactcaggctggcgccaagtaggagttggcgcagggtgcgggcgagaagcgtcggttgctggggcatgaagagcggtccttagaaggaaggatcaagggggctttccttctctgtcacgcgaggtgtgcaaaacggctcacagtgtttgaaattaatttcaggcgcgtgcctgtaccgtcacccaataccgcgtgaagcgccgtactttcaccggcaggctcacttccagcaggtccagaatgcgttcactgtcgtccagcgggtagctgccggagatcaacaggttggccacctgcgggtcgcaattgagctggccacgacgataacggccgagttcgccgaggaaatcttccaggcgcatgtgggcggcgaccagcatgccgtcggcccaggcaccgctgttggcgtcggtagggcgcggggtatcccagcctttgcgggtgaagttgacctggcgcgcggcctcgaccgtcagcggcaggccgctgtaggtgttgggcattacctcgacgcggccatcgaataccgccagctgggtgtggtcgttgaactggcgcacgttcatgcgtgccgcgtggctggtaagtagaccctggccggtcaacacgttaagcggtgtgttgccggcgaaaccggtcagcaggatttcgccttcaagcaggcggatcagtcgttgctggccatcgaagtgcacatccactgcgctgccggtattgagctgcaactggctgccatcggccaattgcaccttgcgccgctggccgatggggctgcggtaatcggcggtcagcggcggcaggatatgttgctggcgcaggccccaggcggcggccgaaccggcaccgaggatcaacagcaacttgagcgcttggcggcggctggtggaggttggcgcgttcaacgccgcgtgggccagcggcgagggcatgccgcgcaggcgctggttgacgcgttgcatatggtcccaggcgcgctggtgttcgctgtgggcgttcagccagtgttgccaagcggcctgctggcgtgggttgaggccgccttgctgcatttccatcagccaatgcacggcctgttcggcgacttgagtggagaaggtcatagggcgaaatagcagcgcatggccgctttggtcaggtgacgcttgacggtggcgatggaaatccccaactcagcgccgatttgcgcgtaggtcaggccatccagctgggccagcaggaaggcgcgcttgacctgcacgggcaggccatcgagcagttggtccagctcgaccagggtttgcaggatgattgcgcgttcttcttcggatggcgccacgtgttcgggcatgtgtgccagggcatcgaggtaggcgcgttccaggtcctggcggcggtagaagttgaacagcacgcgcttggcaaccgtggtgagaaacgcacggggctcgaccagcgtgggggtttcccgcgcggtgagcacgcgcatgaaggtgtcctgggcaaggtcagcggcgctttccgggcagccgagcttgcgtcgcaaccagccggtgagccagtggtgatggtcggtgtacaaaacttcgacggtgttggacgggctcaacggggacactccacaagcatcgccatgctttagagaacaagaattgttcgcattgtagggtccgtgaagggcttcggcaatccatccgcgcaggtgattcatccgttctgttttgcttatgagaatatttatcattaatattgcgcgctgatgaacctggcgcctcccgcatgaaaagcaaaacctcgctgcctgtctcctatcgtctcgccgtgacttcgcgcgtgttggctgccgtggtgggcggttacctgatggcgtccctggccagtatctgcctggcgctgtggctgcccacctcccgcgccgatgcggtgatcaccgggatgatgagttccttcgtgttctacctgctggcagtcatctggtgtttcgcctgccgcagcgccgcacgtgcctggttcggcgtgatgctgccaagtgccgcgtttgctaccttggcgggcgtgggcttgtggatgacacgggtatgaaagagggtttccgtcaggcgatggcctggttgcacacctgggccgggctgatctttggctggctgctgtttgcgattttcctgacaggcaccctgtcgtatttcaaggacgagatcagccactggatgcagcccgaagtgcaggcccgtcccctggacgatgcacgcagcctcaccgtcgcccaaacctatctgcagcaggtcgcacccaccgccgctcgctggttcattaccttgccggatagccgcgatcccggcctgtcggtgatgtggcaggacaaagtcgaccccggcaagcgtggcaacttcatccagaaaaccctcgaccccgtcaccggccaggccgtgcaggcccgtgaaagcatgggcggcgagttcttctatcgtttccatttccagctgcaaatgccttacccgtggggccgctggctgtcgaccatcgccgcgatggtgatgttcatcgcgctgatcaccggcatcatcacccacaagaaaatcttcaaggacttcttcaccttccgcccccgcaaaggccagcgttcctggctcgacgggcacaacgcggtgggtgtgctggtgctgcccttccatctgatgatcacctacagcagcctggtgatcttcatgagcatggtgatgccggcgccgatcctggcttcctacggcaacgaaacccgcgcctttttcagcgaggtgttcccgaataccaacaacgcccctgcattgggccagccagccacattgctgccgctggtaccgatgtacgagcaggcgcgggcgcagtgggcgggtgggcatgtggggcgtgtggcggtgaataaccccagcgatgtgaacgcctcggtcaatgtgttccgcgcaggttccgacagcgtggtgcacgatttcggcagtaccgtgtccttcaatggcagcaccggtgaactgttgcgagtgagtggcgggcagtcgctgccggctgccatcggcggcagtttctatggcctgcacatgggccatttcgccggcccggtgctgcgctggttgtactttatctgtgggttggcgggcacggcgatgatcggcaccgggctggtcatctggcttggcaagcgccagctcaagcacgccaaggccggcgtgatgccctttgagttgcgactggtggaagtgctcaacattgccagcatgtccgggctgatgatcgctatcgcggcgttcttctgggccaaccgcctgctgccggtgagcttcgccgagcgttccgactgggaagtgcagaccttctttattgcctggggcctgagcctgcttcacgccatcctgcggcgtggccgccagggctgggtcgagcagttgagcgtcggcgcattgctgtttattgccattccattgctcaacgcgttgaccacctcgcatcacctgggcgtttcattggccaccggcgactgggccatggccggcttcgacctgacgtgcctggccagcggcgtgttcctcggctgggcagcctggaagatgcagcaccgcaccgtgcctgcgcccaaggccgaacgtgcacgcgggttgacgctcaagcaggaggcgaactgaatgctactggcgctgctgatgtgctacgtcgggttcaccgcattgtgcttatccaccgaccgtcatcacggtgagttgctgcacagcaaactctcgtcccgtcggcgtacggggttgcgtgtggccgggtggttgctgctgaccgtgtcgatctggcccgccgtggccatcgccggttggggccagggcctggtggagtggtgcgccgtgttgatgctcagcgcattgctgctggtgttgctgttgccatataggccaaggctggccttgatcctggcgggtgtcggcctgctcgccagccctgttgcagccttcgccaccctctgagcccacccatgatgatcagcaccccacccgaaccccaggacagccagcacgctgacgcggccggtgggcgtgcgcatttcctgcaggtgttcctgtcccagcgttcgcagatggaggccctggtgagtcgccgcgtggggtgccgcgcgacggcggcggacctggtgcaggacctgttcctgcgcttctggcgccggccgctggtgcaggtcgaagaactcagtacctacctgttgcgctgcgccggcaatatcgccatcgatcacttgcgcagcgaaggcgcgcgagtgcgcagcaacgaaggctggctgcccgaacagcaggacaaccaaggctccgagccccaggcggcgctggaagctggcaatgatctgcgccatgtcgaagcggccctgcgcagcttgcccgagcgcacgcggcagattttcctgctcaaccgcatccacggccgcaagtacgcagaaatcgccaaggccatgggcctgtcccaaagtgccgtggaaaaacatatgatgcgtgccctcgaagcctgtaaagccagccttcgcgacccctcatccccacgcacgccagggaaagcaccgtgaacgtcacccccacgcccgcccaggaacacgccgcactggcctggctgagcctgttgcatgaccagccgagcagcggtgaccaggccacgttcagccgctggctgcgggccgatcctgcgcatgtcgaggcgtatgcccaggcccaggtgctgtgggagttgagcgaagttccggcgcgaaggctggcggacgaagaagccatggccttgcagggctacctcaatgcgatgaacacctcgaagcgttcgcgggtggtgcgttggtccggggcgttggccatggctgcgtgcctgttggtgatggtgtccatgggcgccggctggcagccgtcgcggtgggtcgatgactttggtgcggactacgtgacggcgcccggggaaatcaaaaccgtcacgctggctgacaaatcccaggtcaccctggacgctgacagcgccatcgctgtggatttcaaccatggtgagcggcatatccagttgcgtcgcggcgccggttttttcagcgtgacccataccggtgagtcgttcgtggtggaggcgggcagcggtgaagcgcgggtgctgggtactcagttcgaagtgcgcctgcaaccggcaggcgcccaggtaacggtgttgtccgggcgggttggcgtgacgccgtcaaagcaggggcaacagcagattcttaccgccggccagcaagtggcctatgccgatggcaatgccgaaccgatgcatggggtcgacagcgaatcacgcctggcctggcgcgacggctggctcaactactacaaggcgccgctggcggacgtggtgaaggacctgggccgttactaccccggtcgcatcctgttgctcaacgacgagatgggcgccaaacgcgtcagcggcagcttcccgagcaaggacccactggcggtgctgaatgcgttgcaggcggtgctggggtttgaacagcaccacgtgctggggcgcatgatcgtggtgcgctgattacttcagcgctgccatgatcttctccgggctgtactcgcgaatcagcgagccgttcacgtccacaaacggaatcccaccaccgcccaacgcctcatacgccttgcgcgcctgggcgtccttctcgatatcgaacgcctggtaagggatgcctttctggtccaggaaacggcggatctgcttgcagtacccgcaccactcggtggcgtagagcgccacgcgcgccttcgcccgcgtctgctctggcaccacctgcgatgggttgaacacccgctcgatcttgccccagttctggatcaccaccaccaccagcaataccagcaggactttcttgaagaccccgccgagcatcagttacggcgcttgagctggtcggtcagttgggtcggcaggcccttgatgatcaaggtgccggcggcttcgtcgtactcgatcttgtcgcccagcaggtgtgcttcaaagctgatggacaggccctcggcgcggccggtgaagcggcggaactggttgagggtgcgtttatccgccgggatctccggtgacaggccgtagtccttgttgcggatatggtcgtagaacgcctttggccgatcttcatcgatcagccccgagagttcttccaggcccatgggttcgccaagcttggcctggctgctggcgtagtccaccagggtcttggttttttcgcgggcggattcgtccggcaggtcttcgctctccacgaagtcactgaacgccttgagcaaggtgcgggtttcgcccgggccgtcgacgccttcctggcagccgatgaagtcgcggaagtattccgacaccttcttgccgttcttgcccttgataaacgaaatgtactgcttggactgcttgttgttctgccactcggacacgttgatccgcgccgccaggtgcagttggcccaggtccaggtgacgggacggggtcacgtccagctcgtcggtcaccgccacgccttcgctgtggtgcagcagggcgatggccaggtagtcggtcatgccctgttggtagtgggcgaacagcacatgcccgccggtggaaaggttggactcttccatcagcttctgcaggtgctcgaccgccgtgcggctgaaggtggtgaaatcctgcccgccgtcgaaatactccttcaaccagccgctgaacgggtgcgcgcccgactcggcatggaagaaaccccaggccttgccttgtttggcgttgtagctctcgttgaggtcggcaagcatgttctcgatggcggccgactcggcaagctcggagtcgcgggcatggagaactgcgggtgtgccgtcgggttttttgtcgatcaggtggacgatgcaatgacggatcggcataggcttctcggctggttgagaggggagcggtgggcctccccgaaaagtcgccaagtgtaccgcaccattggccaagacgtgcttcgaagggtgttttgggcagcttccgacggggcatatgcctttttttcacggtttagagcgataaagctgaccaaatgggtaggtagaggcggatatttccccgtctctgtgctagttttgccccgtcttacgccaagtctcggcgataagcgtgcattcagcatctgtcaggtcgaaccaatccccgtttcaagcatctataaccccgatctccgtggttataagcctggggtgccagaccatgacggtcgggctcgacggctgacactgcactctgcaatccatatgaatttgatagggaaggaacaccacaatggctattactaaagaccaactgatcgctgacctggctgaagcagtagacgcaccgaaaactaccgtgcgcgctctgctggaccaactgagccatgttgttgctgaccagctggaaaacggcggcgaaatcactctgccaggcgttggcaaactgaaagtgaccgagcgtcctgcccgtactggccgtaacccttcgactggcgctgccatcgaaatcgctgccaagaaagttatcaagctggttgtggccaaaggcctgaccgacgctgttaacaagtaagacgcagcaaaaaaaaccgtgcttcggagcgatccgggcacggttttttgttgcctgcgatttgtgtctagcgcacccagcgctggcgccagatctgttgctcgttcttgctctggaaggtccaggctacaaagcggctctgcttctgcccctgggacatttccaccacctggctttccagcacgccggcttttttcagggctgtctcgatcgcgggcaagttcgacgcttttgacaccaggcaactgaaccacaacaccttgtgggcaaaatgcgcactttcagcgatcagttgcgtcacaaagcgcgcttcgccaccttcacaccacagttcagccgattggccaccaaagttcagcaccggcaacttgcgcttgggatcggccttgcccagggcgcgccatttgcgttcgctgcccttggtcgcttcgtccatggacgcatggaacggcgggttgcacatcgtcaggtcgaagcgctcacccggctccagcaagcctagcaggatctgcttggggttggtttgctggcgcaactggatgaccttgctcaggtcgttggactgcacgatggccttggctgcggccactgcgatagggtcgacctcggagccgaggaagttccagcggtattccatgtagccaatcagcgggtagacgcagttggcgcccatgccgatgtccagcaccttgacgatcgaaccgcgcgggatcttgccgtcattggtgctggccagcaggtcggcgaggaagtgtacgtagtccgcacgccccggcactggtgggcacaggtagtcggccggaatgtcccagtgctggatgccgtagaaggctttgagcagcgcacggttgaacacgcgcaccgcatccgggctggcgaagtcgatactttccttgccgtacgggttgatgatcacgaattgcgccagttccggcgtggtcttgatcagcgccgggaagtcgtagcggcctgtgtggcggttgcgcggatgcagggtggcctctttgcgcggcacaacgggcttggccgtggctgcggttttaggcttcttgcgcggaggttttggcgtgctgggggcggtcatgatgattctggtgttggctcaaagtggtgggcattgtcacacatcctgagcctgtcccggtcaaatgtgggagggtgcttgcccccgatggcggtgtnnnnnnnnnnnnnnnnnnnnnnnnnacaccgccatcgggggcaagcaccctcccacattggccgcgtgtacaggcgtttcagacaaaaaaagagacccgaaggtctctttttctacacgactcacaccttacaggctggaaatccgcgcatgttgctccgccagcttgcccagggcctgttcggcctcggccagcttggcgcgttccttctcgatcacttcagccggcgctttgtcgacgaacgccgcgttggacagcttgccgcccacccgctgcacttcgccttgcaggcgtgcgatttccttgtcgagacgggccagttcggcacccttgtcgatcaggccggccatcggcaccagcacttccatctcgccaaccagtgcggtcgcggacagcggtgcttcttcgccggttgccaatacggtgatcgactccagcttcgccagcttcttgagcagcgcatcgttctcggcgagacgacgcagatcctcggcgctggcgttcttcacaaacaccgccaatggcttgcccggcccgatgttcatctcggcacggatgttacgcgtacccatcatcagggtcttgagccattcgatatcgctttcggccgcttcatcgatgcgcgcttcgttggccaccggccaaggttgcagcatgatggtcttgccttcgataccggccagtggcgccaggcgctgccagatttcttcggtgatgaacggcatgaacgggtgggccaggcgcaacgccacttcgagtacgcgcaccagggtgcgacgggtgccgcgctgacgttcgatcggtgcgttctcgtcccacaggaccggcttggagagttccaggtaccagtcgcaatactggttccagatgaactcgtacagggcctgtgcggccaggtcgaaacggaactggtcgagctggcgggtcacttcggcttcggtgcgttgcagttgcgagatgatccagcggtcggccaggctcagttcgacggcttcgccgttctgaccacagtcttcgcctttatccagcacgtagcgcgccgcgttccagatcttgttgcagaagttgcgatagccttcgacgcggcccatgtcgaacttgatgtcgcgaccggtagacgccagcgagcagaaggtgaaacgcagggcgtcggtgccgtagctggcgatgccatcggcgaactcgtcgcgggtctgcttctcgatcttcttcgccagtttcggctgcatcaggcccgaggtgcgtttctgcaccagggtttccaggtcgatgccatcgatgatgtccagtgggtccaggacgttacccttggacttggacatcttctggccctggccgtcacgcaccaggccgtgcacgtacacggtcttgaacggtacctgcggggtgccgtcctcgttcttcaccaggtgcatggtcagcatgatcatccgggcaacccagaagaaaatgatgtcgaagccggtgaccagtacgtcggtggagtggaatttcttcaggaattcggtctgttgcggccaacccagggtggagaaggtccacaggcccgagctgaaccaagtgtccagtacgtcgttgtcctgttgcagcgcaacgtcggggcccaggttgtgcttggcgcgcacttcggcctcgtcacggcctacatagaccttgcccgactcgtcataccaggccgggatgcggtggccccaccagagttgacggctgatgcaccagtcctggatatcgcgcatccacgagaagtacatgttttcgtactgcttgggcacgaactggatgcggccgtcttccacagcggcaatcgccggttctgccagcggcttggtggacacgtaccactggtcggtcagccacggctcgatcacagtgccggagcgatcgcccttcggcactttcaggccgtggtcgtcaacgctcaccaacaggccggcggcgtcgaaggcagcaacgatctgcttgcgcgcttcaaaacggtcgaggccggcgtattcagccgggatcttgccgtcgatgctctcgttcagtgtgccgtccaggttgaacacctggcaggccggcagaacggcggcgttcttgtcgaagatattcagcagcggcaggttatggcgcttgccgacttcgtagtcgttgaaatcgtgggccggggtgattttcacgcaaccggtgccgaattcagggtcgcagtagtcgtccgcgatgatcgggatacggcggccaaccagcggcagttcgacaaacttgccgatcagcgccaggtagcgttcatcgttcgggttaaccgccacggcggcgtcgccgagcatggtttccggacgcgtggtggcgacgatcaggtagtcgttgccttcagcggtcttggcgccgtcggccagcgggtacttgaggttccacaggaagcctttctcgtcgtggttttccacttcaaggtcggaaatcgccgtgtgcaacttggtgtcccagttgaccaggcgcttgccgcggtagatcaagccgtcttcatgcaggcgcacgaaggcttctttcacagattccgacaggccgtcgtccatggtgaagcgctcgcggctccagtctacggacgagccgagacgacggatctgacggctgatattgccgccggactgatccttccattcccagatcttttccaggaatttctcgcggcccaggtcgtgacggttctggccggtggcttcgagttggcgttccaccagcatctgggtggcgataccggcgtggtcggtgcctggctgccacagggtgttgcggccctgcatgcggcggaaacggatcagtgcatccatgatcgcattgttgaagccatggcccatgtgcaggctgccagtgacgttcggtggcggaatcatgatggtgtaggaatcgcccgcgccttgcggggcgaaataattctcggattcccaggtgttgtaccaggaagtttcgatggcgtgcggctggtaggtcttatccatgcgcggcgggaccctagttggcatttattcaggaaagccggcaagtataacggggctgggagctgagggcgagttgaagacttgtgcaaatcaaaggtgggaggcttgtcccctcccacaggaagtttatgcaaggctcaggactggtattggctgagcagccgctccatccgcgcatccagccggcgcttgatctcggtttcgatatgcggggcgaagtcgtcgatcacgtcctgcatgatcagttgtgcggcggcgcgcagttcgttgtccaggtgcagtagcagggcgtcgggccctttttcagcgggggcaggttcgacggagggagcttcgacaaccggctccggcgcgacaggtttgccgccgaccatgtcgaacagcagcggaatctgtacctcgccatcgaccgtctcggtcaacagcggcggttgcaagtcatcatcacccagtaactgacggatcgactccaggtcgtccagcaggtggtcgtcttttttctgcgggtttggcgtgtccatcatttactcaaagtcgttgtagccggtgatcctggagaggatagccctgttcgcggtagaaacggaaactctcccgcgcggcctgacgaatagccggatcttccaccaccacctctgccacacgggcaaaagccttggcgaatggcggtactttcaggtccaggttgaccagcaggtcatggtgatcgccgcaactgtcacccaaacccagcaccaccaggccttcaggttcagactcggcggggccgtggggtacgaagctttcgcccttgaagcgccacaggcgggcatccagctcatcgcgttgggcggcatcgctgcaatgcaggtagatgcggtggcccatgcgccaggctttttcggtgagtttgcaggcaaagtccaggcgcgcgagcggatcggcgctgggcaatatatagaagtcgacttgggtcattgcggttcctgagaccgaggcgacgtaagagtcgcctcggaatcttcagtttcaggccttggcgcgatccagcaggtactgggtcaacaatggcaccggacggccagtggcgcccttgtccttgccgccgctggtccaggccgtgccggcgatgtccaggtgcgcccagttgaagttcttggcaaagcgcgacaggaagcaggccgcagtgatggtgccggcttttggaccaccgatgttggcgatgtcggcgaacgggctgtccagctgttcctggtactcatcgaacagcggcagttgccaggcgcggtcgtcggcggctttaccggcgctgagcagttgctcgatcagctcgtcgctgttacccagcaggccggaagtgtgggagcccagggcgacgatgcatgcgccggtcagggtggcgatgtcgatcacggcctgtggcttgaagcgctcggcgtaggtcagggcatcgcacagcaccaggcggccttcggcgtcggtgttgaggatttcgacggtctggccgctgagggtggtgacgatgtcacccggacgggtcgcgccgccgctcggcatgttctcggcacaggccaggatgcacaccaggttgatcggcagcttgagttccagcacggcacgcagggtgccgaacacgctggcggcgccgcccatgtcgtacttcatctcgtccatgcccaggcccggcttgaggctgatgccgccggtgtcgaaggtgatgcctttacccaccagggcgtaaggcttctcggacttcttgccgccgttgtattgcatcacgatcaggcgtggcggctggtcgctgccttggcccacggcatagaacgagcccatgcccagttccttgatcttcttctcgtccagcacttcgactttcaggcccttgaactccttgcccagcgccttggcctgttcgccgaggaacgtcgggtggcagatgttcggcggcaggttgcccaggtcacgggtgaacgacatgccgttggcgattgcagtcgcgtgggtcacggcgcgctcgacttcagcctgggcggccttgatggtcagcagggtgattttcttcagggcacgcggttcggccttggtgctcttgaactggtcgaagatatagccgccgtccaccaggctttcggccagcaggcgggtcttgccgtagctgtcacggcctttgaccacgatttcatcgagggccagtgcggcatcagtgccacccaggcccttgagggtgttgaggatgccgctgatgatcttgcggaacgggcggtcgcccagctcggcatccttgcccacgcctaccagcaatacgcggtcggccttgaggttgggcaggctttgcagcagcaggctctggccgactttgccggccaggtcgccgcgcttgagcactgcgctgatagcgccgccgctgagttcgtcgagttgcttggcggccacgccgagcttgcggccttcgccgatggcgaccacgagggtggcggttttcaacgtttcggggctaacgctttttacaaccagttccattttcgggtcccttataaaggtcggttagccaggagtctgtactccggctttaataccaggcagctgtgtaaaccgccggcgacaaaggccgcagtttgaacctcgccgacggagcctgacaacccttggtgcacgctttgtgcgtgtgcacgagcaagctccgtgacaggcgcggtcaatcacaggataatgcgccatctttttagccggccctgtataaacgggctgtctcggtatgcttgcttgtttggccgccttagcctgacaaccctggagtgtctggtttgattgtcttccgttatctgtcccgcgaagtcctgttgaccctgagtgccgtgagtgcggtgctgctggtcatcatcatgagtggtcgtttcgtcaaatacctggcccaggctgcctccggcgccctggacccgggctcgctgttcctgatcatgggcttccgcctgccgggcttcttgcagttgatcttgccgttgggcctgttcctcgggatcctgctggcctatggccgcttgtacctcgaaagcgaaatgaccgtgctctcggccaccggcatgagccagcagcgcctgctgggcatgacgatgatcccggccgccggcatcgcgctgatcgtggcctggctgagcctgggcctggcgccccagggcgccttgcagttccagttggtgctgaacaagcaggatgcgatgaccgagttcgacaccctcgagcccggtcgtttccaggcgctcaatgacggttcccgggtgacctacaccgaaaccctgaccgacgaccgcgccaacctgggcggtgtgttcatctccgagaaacgcctgggccaggacaagaaagaccggggcatttccgtgctggtggccgattcggggcgccaggaagtgcgtcctgatggcagtcgctacctgatcctggagaatggctaccgctatgacggcagcccgggcatggccgattaccgcgcgatcaagtacgacacctatggcgtgatgctggctcgcccggacatcagcgacgaagtcactgaccgtgatgccatcccgacgactgacctgtggggcagtaaggaactgcgctccgttgccgagctgcaatggcgactctccctgccgctgctggtgttcatcgtgaccttgatggccgtgccgctgtcgcgcgtcaacccgcgtcagggccgattcctcaagctgttgccggcgatcctgctgtacatggcttacctgaccatcctgatttccgcccgcggctccctggagaagggcaagctgtcgccgaccctgggcctgtggtgggtgcacgggatcttcctggtgatcggcctggggctgctctactgggaaccgatccgtttgaaaatgatgagccgtcgcggccagaaggagttggctcgtggctaagctcgatcgctacattggtagcagcgtactgatcgccatcctggcggtattgggcatcatcctcgggctggcgtcgttgttcgccttcatcgatgaagtgggcaacgtcagcgacacctacaccgtgtgggacgtgctgagctatgtggccctcaccgcgccgcgtcgcctctacgacatgatgccgatggccgcgctgatcggctgcctgatcggcctgggcagtctggccagcaacagcgaactgaccatcatgcgcgccgccggcgtgtccatcggtcgtatcgtctgggcggtgatgaagcccatgctgctgctgatggcctgcagcgtgctgatcggcgaatacgtcgcgccaccggccgaaaccactgcccaggccaatcgcgccctggcccaggggtcgggcgatgcgcaaagctccaagcatggcctgtggcaccgccagggcgatgagttcatccatatcaacgcggtgcagcccggtggcctgttgattggcgtgacccgctacacgttcgacaaagaacgtcacctgctggaatccagcttcgccaaacgtgcgcagtacagtagcgaaaaatggcaactcagcgacgtcaccacgacctacttccgtaatgtcggccaaggcaccaaggccagcactgaagtgatcaacgtgccgagcgaggagtgggacatcgccctcaagccggaactgctcaataccgtggtgatgatcccggaaagcctgccgatctccgggttgtggggctatatccactatctgaaggaccagggcctgaacaacggccgctactggctggcgttctgggtcaaggtgttgcaaccggtggtgaccgccgcgttggtgctgatggcgatttccttcatctttggcccgctgcgttcggtgaccctgggccagcgcgtattcacgggggtgctggtgggtttcaccttccgcatcgcccaggacctgctgggtccgtcgagcctggtgttcggcttctcgccgctgtttgcggtgctggtgcccacggccatctgcgccctggcgggcttctggttactgcgtcgggccggttgataccgcgcttatgatcaaaaaatgccctggtcgagagatcggggcatttttgttctggtcagcaaagatgacgtctggcctgagcatcaggtacaattcccggctatttttcagcgggcaatctgcctgcagcctttttgagtgttgatccgtgagtgatttgagtcatatccgcaatttctccatcatcgcccacattgaccatggcaagtcgacgctggccgaccggttcatccaaatgtgcggtggccttgccgagcgtgaaatggaagcccaggtcctggactccatggacctcgaacgcgagcgcggcatcaccatcaaggcccacagcgttaccctgtattacaaggccaaagacggtatcacctaccaactgaacttcattgacaccccgggccacgtcgacttcacctacgaagtcagccgttccctggcggcctgtgaaggtgccttgctggtggtggacgcaggccagggcgtggaagcgcagtcggttgccaactgctacaccgcgatcgagcagggcctggaagtcatgcccgtgctgaacaagatcgacctgccccaggccgagccagagcgcgtcaaggaagagatcgagaagatcatcggcatcgacgccaccgacgccgtcacctgcagcgccaagaccggcctgggtgtcgacgaagtgctcgaacgcctggtgcacaccatccccgcgccgaccggcaactacgaagatccgctgcaagcgttgatcatcgactcctggttcgacaactacctgggcgttgtctccctggtgcgcgtgcgtcatggccgtgtgaagaaaggcgacaagatcctggtcaaatccaccggcaagatccacctggtggacagcgtcggtgtattcaaccccaagcacaccgcgaccgttgatctgaaagccggtgaagtaggcttcatcatcgccggtatcaaggacattcacggtgcaccggtgggggacaccctgaccctgagctccacgccggatgtcgacgtgctgccgggcttcaagcgcatccagccgcaggtctacgccggtctgttcccggtcagctccgacgacttcgaagacttccgcgaagccctgcagaagctgaccctcaacgactcgtcgctgcagtacaccccggaaagctccgacgccctgggtttcggcttccgttgcgggttcctgggcatgctgcacatggaaatcatccaggagcgcctcgagcgcgaatacgacctggacctgatcaccaccgcgcccaccgttattttcgagttgttgctgaaaaccggtgaaacgatttacgtcgacaacccgtccaagctcccggatctgtcggccatcgaagacatgcgcgagcctatcgtgcgggccaatatcctggttccgcaggagcacttgggcaacgtcatcactttgtgtatcgaaaaacgtggcgtacagcgcgacatgctgttcctcggtacccaggtccaggtgacctacgatatgccgatgaacgaggtggtgctggacttcttcgaccgtctcaaatccaccagccgcggctatgcttcgctggattaccatttcgaccgttaccaatcggctaatctggtgaaactggatgtgttgatcaacggcgacaaggtcgatgccctggcactgatcgtgcacaaggacaacgcgcactacaaaggtcgccagttgaccgagaagatgaaagaactgattccgcgccagatgttcgacgtcgcgatccaggccgccattggcgggcagatcattgcacgaacctccgtcaaggcactcagaaagaacgtactggccaaatgctacggcggtgacgtaagccgtaagcgcaagctgcttgagaagcaaaaggccggtaaaaaacgcatgaagcaagtaggtaacgtggaagttccacaagaagccttccttgcggtgctcaggttggatagttaggtcctatgtcgctaaatttcccgctgttgctggtcatcgccgttgccgtttgcggtctcctggcgttgctcgatctggtgttcttcgccccgcgtcggcgggcggctatcgcggcctatcagggcagcgtcagccagcccgatggcgtggtgatcgagaagctgaacaaagagcctttgctggttgaatacggcaagtcgttcttcccggtgttgttcatcgtgctggtgctgcgttcgttcctggtagagccgtttcagatcccgtcggggtcgatgaaacctaccctggacgtgggcgacttcatcctggtgaacaaattttcctacgggatccgcctgccggtgatcgacaagaaggtcatcgaagtcggtgacccgcagcgcggcgatgtgatggtgttccgctacccgagcgacccgaacgtcaactacatcaagcgtgtggtaggcctgccgggcgacgtgattcgctacaccagtgacaagcgcctgttcatcaacggtgagtcggtggccgagaagctgctgggttccgagccgaacagcctgggcagcgccgagctgtaccaggaaaaactcggtgcggtagagcacgagatccgcaaggaaatgagccgctaccgtgcacagcctgacggccagtggaccgtgccggccgggcactacttcatgatgggcgacaaccgcgacaactccaatgacagccggtactgggatgaccccaacattcccaaggacctgctgggcatggttcccgaccagaatatcgtcggcaaggcctttgcggtctggatgagctggccggaacccaaactcagccacctgccgaacttctcgcgggtcgggctgatcaagtaatacaggcggcgctgtgaacacagcgccgaatgcttttctggggtggggacaaatcggtcctgcctcatgcagcaccaaccaggatttgaatttgaacactgcgtcaatcgtcgatggccgccggtgccaccaactagatatggataaaccgtgaccgtttctctagcacgtctcgagcgccagctcggctacaccttcaaggaccaggaattgatggtccttgccctcacacaccgcagctttgccgggcgcaacaacgagcgcctggaattcctcggtgatgccatcctcaacttcgtcgccggtgaggcgctgttcgagcgcttcccccaagcccgtgaaggtcagctgtcgcgcctgcgtgcgcgcctggtgaagggcgagaccctggccgtgctggcccgtggctttggcctgggcgagtacctgcgcctgggttccggcgagttgaagagcggcggtttccgtcgcgagtcgatcctggccgatgcccttgaagcgctgatcggtgcgatctacctcgatgccggtatggaagccgccaaggaacgcgtcaccgcctggctgacctccgagatcgagagcctcacgctggtcgacaccaataaagaccccaagacccgcctgcaggaatttttgcagtcccgcgggtgcgaactgccacgctacgaagtggtggatatccagggtgagccccattgccgcgtgttcttcgtggaatgtgaaatcaccttactgaacgaaaaaagccgaggtcagggtgtgagccgccgtattgccgaacaggtagcggccgccgcagcactgattgccctgggcgtggagaatggccatgactgattcaaccgcaacacgctgtggctatgttgccatcgtcggccgcccgaacgtgggcaagtccacgctgctcaaccacatcctcggccagaagctggcgatcacctcgcgcaagccgcagaccacccgccacaacatgctgggcatcaagaccgaaggcagcgtgcaagcggtgtacgtcgataccccgggcatgcacaagggtggcgagaaggcgcttaaccgctacatgaacaagaccgcttcggcggcgttgaaagacgtcgacgtggtgatcttcgtggtcgaccgcaccaagtggaccgacgaagaccagatggtcctcgaacgtgtgcagtacgtcaccggtccgttgatcgtcgcgctgaacaagaccgaccgtatcgaagacaaagccgagctgatgccgcacctgagctggctgcaggaacaactgccgaacgcccagatcatcccgatctcggcccagcacggccacaacctcgatgccctggagcgcgtgatcgccgagcacctgccggagaacgaacacttcttcccggaagaccagatcaccgaccgcagcagccgcttcctcgccgctgaactggtgcgcgagaaaatcatgcgccagatgggcgcggagctgccgtaccagatcaccgtggaaatcgaagagttcaagcagcagggcaagaccttgcacatccatgcgctgatcctcgtcgagcgtgacggccagaagaaaatcatcattggcgacaagggcgagcgcatcaagcgcatcggcaccgaggcgcgcaaggacatggaattgctgttcgattccaagatcatgctcaacctgtgggtgaaggtgaagggcggctggtccgatgacgagcgcgcactgcgctccctgggctatggcgacctgtaaggtcctgaatgcaccgcagggctgaaaatgtgggagggggcttgcccccgatagcggtgggtcagttgacaaataagtgactgacacactgccatcggggggcaagccccctcccacattaggtttgtgtcgttttcaaaagtgcattccagcagtgagcagccatgtcccaatccccaccccccagccaactcgcctacgtcctgcacagccgcgcctaccgcgagaccagcgccttggtggacttcctcacgccccagggccgcctgcgcgcagtcttgcgcagtgcgcggggcaaggcgggcacgctggcgcggccgttcgtggccctggacgtggagtttcgcggcaagggcgagctgaaaaacgtcggccgcatggaaagcgtgggcacctcggcctggctcaacggcgacgcgctgttcagcggcctctacctcaatgaactgctgatccgcctgctccccgccgaagacccgcacccggcagtcttcgatcactacgccgccacactgttggccctggccgaaggtcgtcccttggagccgctgctgcgtgcgttcgaatggcgcctgctcgatgacctgggctacggcttcgaactggtcaacgacctgcacggcgagcccatcgccgccgatggcatgtatcgcctgcaggtggacgccggcctcgagcgtgtgtatctgctgcaacccggcctgttccagggcaccgagctgctggccatgagcgaagcggactggacggcgcccggcgccttgtccgccgccaaacgcctgatgcgccaggccctggctgtgcatttgggcgggcgcccgctggtcagtcgcgagttgtttcgaaagccctgacaaccccgtgtatgctgtgcggcgtttctttcccttttcaggagcgcttccgtgaccaccagcaatcgcattcttcttggcgtcaacatcgaccacgtcgctaccctgcgccaggcccggggcacccgttaccctgacccggtcaaggctgcgctggacgccgaagaagcgggcgccgacggcatcaccgtgcacctgcgcgaagaccgccgccacatccaggagcgcgacgtgctgctgctcaaggatgtgctgcaaacccgcatgaacttcgaaatgggcgtcaccgaggaaatgatgcagttcgccgagcgcatccgcccggcgcacatctgcctggtgcccgaaacccgtcaggaactgaccaccgaaggtggcctcgacgtggccggccaggaagcgcggatcaaggccgccgtggagcgcctgtcgaagatcggcagtgaagtctcgctgttcatcgacgccgacgagcgccagattgaagcttcgcgccgtgtcggtgcaccggccatcgaactgcacaccggtcgttacgccgacgccaccacccctaccgaagtggctgacgaactgcaacgcatcatcgacggtgtgagttgcggcctcaaggaaggcctgatcgtcaacgccggccatggcctgcactaccacaacgtcgaagccgtggccgcgatcaagggcatcaatgagctgaacatcggccatgcgctggtggcccatgcgctgttcgtcggtttcaagggcgcggtggccgagatgaaagccctgatcctggccgccgccaagcactaaaaaatactgaagatccaatgtgggaggcggcttgccccttcccacatgcgaacccttactgtttagccgttgcaggtgtatcgtatctgccctttgcaggccttgggcctgcggccgatacgtgaggttgttgtgtcccgatccttttcccgtcgacaaatcctgggtggtcttgcaggcctggccgtagtgggcgtcggtgccggtggcgcctatcgctactggctggggaaagtcgccgaagccgaggctgggcatgattacgaactgatcgccgcgccgttggacgtggagttggtgccagggcacaagacccaagcctgggcattcggcccctcagcgccgggtaccgagttgcgggtgcgccagggcgaatggctgcgggtgcgtttcatcaaccacctgccggtcgccaccaccattcactggcacggtatccgcctgccgctggaaatggacggcgtgccctacgtctcacaattgccggtactgcccggcgaatacttcgactataaattccgcgtgcccgacgccggcagctactggtaccacccccacgtgaacagcagcgaagaactcggccgtggcctggtcggcccgttgatcatcgaagagcgcgaacccacaggttttaagcacgaacgcaccctcagcctgaaaagctggcatgtggatgaggagggcgctttcgtcgcgttcagtatcccgcgtgaggccgctcggggcggtacggcagggcgcttgtcgaccatcaacggcgtgtcccaggcggtgatcgatttgcccgccggtcagattacccgcgtgcggttgctcaacctcgacaacaccctgacctatcgcatcaacattccagacgttgaagcacagatctacgcgctggacggcaaccctatcgagccacgcccactgggcaaggaatactggctgggcccgggcatgcgcatctgcctggcgatcaaggcaccgccggcgggcgaggagctgtcgatccgcaacggcccggtacggctcggcaccttccgttcggtcgccagcaccgatgcgcccagcgaatggccgtctgcgttgcctgccaacccgatcagcgagccggacctggccaatgccgagaaactcaacttcaatttcgagtgggtgggttcggtctcggtcgacgccgacaacggcaagccacccagcctgtggcagatcaacggcaaggcctgggacatcaccgacaagacctgcgccgatcgtccgattgccaagctggagaagggcaagagctacattttcgaattgaagaacatgacccagtaccagcacccgatccacctgcacggcatgagcttcaaggtgatcgcctcgaaccgccacaaggtgatcccgtatttcaccgatacctacctgctgggcaagaacgagcgtgcccgcgtggcgttggtggcggataacccaggcgtctggatgttccactgccacgtgatcgaccacatggaaaccggcctgatggccgccatcgaggtggcgtgatgcgacagatccgccccaccgcgatcatcgaccgcagccgcgaccaggactttatgcgcgaagccctggccctcgccgcccaaggtgctgcgctgggtgaagtgcccgtcggcgcggtgctggtgcaggacggtgagatcatcggccgcggcttcaactgcccgatcagcggcaacgaccccagcgctcacgctgagatggtcgccatccgcgccgccgcgcaagccatcagcaattaccgcctggtgggcagcaccctttacgtgaccctggaaccgtgcagcatgtgcgcgggcctgatcgttcattcacgggttgcccgtgtggtgtatggcgcgctggagcccaaggcggggatcgtgcaaagccaggggcagttttttacccagggctttctgaatcatcgagtgttgtttgaaggcggggtgctggctgaggagtgcgggacggtcttgagcgagttcttcaaggcccgaagagccaagcccgctctctaaacgacactggagatccaaatgtgggaggggcttgcccccgatagccgtgtgtcagtaagcatatttatgactgatacaccgccatcgggggcaagccccctcccacatttctgatctccattcattcaaggagaccggaagttatttcctggcgacgatcaccgcccgcatcggcgccggcagtccttcgatagtcttgctgtggtcctcggggtcgaggaagtcactcagcgactggtacttcatccactccgtcccacgctgttcctcgacggtggtcacgctcacatccacgcagcgcacatcactaaagcctgcacggcgtagccatagcatcagcgccggcactgagggcaggaaccacacgttacgcatctgcgcgtagcgatcttccggcactagcacttgttgctgatcgccttcgaccaccaaggtttccaacaccagttcgccacccttgaccagggtgtctttcaacgccagcaaatgctcgatcggcgaacggcggtggtagaacacgcccatggaaaacaccgtgtcgaagccttccagattcgctggcaggtcttcgaacgggaacggcaggtgccaggcccttggctcggacaggtagcgctgcacagcctggaactggcagaaaaacagccaattcgggtccacgccgatcacgctgtcagcgccggcgccgagcatgcgccacatgtagtagccgttgccgcagccgacatcaagaatgcgcttgcccttcaggttcaggtgcggcgcaacccgcgaccatttccagtccgagcgccactcggtgtccacatgcacgccgaacaggttgaacggccctttgcgccacgggctcaggcccatcaacgcagtgtgcatctgcgcgcgggtgtcatcgtcgcagtcggtgtcgagtgtcaggccgttgagcaaatccacgtcgctgggctggatcttgggcagcgcatccagcgcactctgccaacgcgcaaggtcgccatgacccttttccatcttgctgtcgagttgcgcttgcaggccctgggcccacacggccaggggagtgccgaccaggtggcgggcgaggggggacagatcaatcatggcaaggcaatcaacgaggcaaagttaagacactggaaccacggcacgactttagagaacccggccgccagcaggcgttcgcggtgttcttcgaggctgtcgggcttcatgacgttttcgatggcgctgcgcttctgggcgatttccagttcgctgtagccgttggcgcgtttgaacgcgatgtgcaggtcggtgagcagcgcgtgttcttcggcattgttgaagcgcaatttctccgacaggatcaacgcaccgcccggcaacagcgattggcggatgcgcgagagcaacgccaggcgctcatcgggggcaatgaattgcagggtgaaattcagcgccaccaccgaggccggggcaaattgcagtgcgaggatatcgccctcgatcacctcgaccggcagcaactcctggaacatcgagtcctggccgttgaggtattcacggcagcgctcgaccatcgccgtcgagttatccaccgcgatcacccggcaaccgtcagtgcgcacatggcgacgcagggcctgggtgaccgcgccgagggacgagcccaggtcatagagcacgctattgggttgggcaaattgcgccgcgagtacgccgaggttctcgacgatggtcgggtaacccggcaccgagcgcttgatcatgtccgggaacacccgcaccacgtcttcgttgaaggcgaagtccggcacctggggcaggggctgggcgaataggcgatcgggttctttgctcacggttgttccggcgacgattggggaaaggccggcattttagccaacttggccctcggatgcgcgggttgtctgatggaaagccgaggcggtgatgccccattgtcccagccagtaagtgacgatcagcaaatacggcgccgcctcgaacgccaccacaaaccgattgatcccgatcagcgtgtcggaaaacacaaacgacgccgcgcccgccgccgccagcagtgccgagcgttgcggcacttcactgcccaagcgtgccagtgcacgccagagcatggcgctgatcaccagcgcatacaccaccaccggaatcagcaggtcgcccaggccgtgggaaatcaggatgctcagcaggatcgcgcccacgcccaacgccagtagcagcggcagccatgcaagacgacggcagtcgctgaaataggccttgaggtacgccaggtgcgcaaacaggaacgcacccaggccaaagataaacaggtcgccgggccacgccagcaacacgtcgcccaccagggagaaaatcagccccaggctgatccagcgtcgatagtcggtgggcggagcatcatgcagccagcccagcagcgccagcaccggcagcggcttgaccagcaggcacagcaaggtggcatgggtgctcaggccgtagatgaaagtgcccgcgcccatcaacgcaagaatcagccaaggcatatcagttcaccgtaatggcgcagtcaaaggtttcgacgggctcggcttccggctcccagggttgctgggaggtcaggcgcaaacggccctggccggcggcgaacgcctggaagcgccaggtcgattgcccgccgccgccgatcacgccggattctgtgctgctgtagacctcagggctcaacgcacgcagtacgccgccagcggaatcctggatggcccagcggtaaccggtggtggggttgctcggcagggtgagggtcaggttttgtccgcttttaagctggagcgggcaggcgctctggttgtccacgctgatgttttgcttcggtgcgctggcacacgcggccagcagggcaaggctcaaggggagaagcaggcgggcagcggtcatgggggctccgttcattcacgacgaagggcgagcataaccgaagatgagacaaggtgtgacaacaggggattttgtgatgaatgttctggccccatcgcgggcaagccccctcccacattttgatttgtgaacacattcaaatgtgggagtgggcttgcccgcgatggcgtcataccaggcgctagatagctgtcagaagagcaccttcgccacatccgcaaagcgcttggcaaagtgcaccgtcatgccttccttgaggtactccggcaactcttcaaaactgccacggttcggctccggcaagatcagctcatggatcttctggcgccgggccgcgatcaccttctcacgcaccccgccaatcggcagcacatgcccggtcaacgtcagttcgccggtcatggccacgccttttttcggcggctggttacgcgccagcgacaacaacgcactggccatggtcaccccggcgctcgggccgtctttgggcgtggcgccttccggcacatgcaagtgcacgaaggcttcatcgaagaatttcggatcgccgccaaacgatttcaggttcgaactgatgtagctgtaggcgatttcggcggattccttcatcacttcacccaattgcccggtgagcttgaagccgcggttgagcgtatggatgcgcgtggcctcgatcggcaaggttgcgccgcccatgctggtccaggccaggccggtgatcacgccggtgccggacagcacttgctcattgcggaacaccggcatgcccagggagctttccaggtccttgttgccgatcttgatcaccgagtccggctcatccagcagcttgaccaccgccttgcgcaccagtttgcccagttgtttctccaactggcgcaccccggcttcgcgagcataaccgtcgatgagtgcgcgcagggcgccgtcgctgatggtcaggctggttttcgccacaccggctttttccagctgcttgggccacaggtgacgcttggcgatggcgactttttcttcggtgatatagcccgacaggcgaattacttccatgcggtccagcaacgggccggggatggaatccagggtgttggcggtgcacacgaacagcactttggacaggtccaggcgcaggtccaggtagtggtcaaggaattcgacgttctgctccgggtcgagggtttccagcagcgccgaggctgggtcgccctggaagctctggcccatcttgtcgatctcgtcgagcatgatcaccgggttcatcacctccacgtccttgagcgcctgcaccagcttgccgggcagcgcgccgatgtaggtacggcgatggcccttgatctcggcctcgtcgcgcatgccgccgacgctgaagcggtagaacggccggcccagggactcggcgatggatttgcccacactggtcttgcccacgcccggcgggccgaccagcagcacgatggagccggcgacctcgcctttataggcgcccaccgcaaggaattcgaggatgcgactcttgatgtcatccaggcccgcgtggtgtttatccaataccttgcgtgcgtgtttcaggtcgagtttgtcctcgccgtacacgccccacggcaccgaggtggcccagtccaggtagttgcgcgttaccgcgtattccggcgaaccggtctcgaggatcgacagcttgttcagctcttcatcaatgcgttttttcgcctgggccggcagcaccttgccttccaggcgttgctcgaactgttcgacgtccgcgctgcggtcgtccttggtcaggcccagctcctgctggatgaccttgagctgttccttgaggaagaactcacgctggtgctcgccgatcttgcggttcacctcggcggagagttctttttgcaggcgggcgacttcgacttccttgcgcagcatcggcagcactttttccatgcgcttgagcatgggcacgcagtccagcacttcctgcaactcgttaccggtggccgaggtcagcgcggcggcgaagtcggtaagcggcgacgggtcgttggggctgaagcggttgaggtagttcttcagctcttcgctgtacagcgggttgagcggcagcaattccttgatcgcattgattagcgccattccgtaggccttgacctcgtcggtcggctcgctgggctggtgcggatattcgacttccaccaggtagggtgggcggtgatgcttgagccaggtcttgatgcgcacgcgggtcaggccctgggcgacgaattgcagcttgccgttctcgcggctggcgtggtgcaccttcaccagggtgccgtacaacggcaggctggaggtgtcgaagtggcgcgggtcttccggcggcgtgtccatgaagaacagggccagggagtggtgatcggacttgcttaccagctccagggtttcggcccatggttcttcattgacgattaccggcagcacttgcgccgggaagaacggtcgattgtggatcgggatgatgtagaccttgtccggcaggttttgcccaggcagggccaggccggtattggacgaggcggattcagcgttttcggggtcggcgtagtcgttgaggtcgtaatcagggaaatcttgctggtcgctcatggggcacctgcataaggaagtatggtgcttagatggggcggggcagtggtggtttcaatggcggggtggagttagcaacaaattgcatgaattcagctgatcttgtgcagataactcggcaacggctgctccggtaacaccgacagcaccttcaaccgctgcaacatacgttgcctggcccgctgcaaatgctcgcgcaggttcagcgccgccgcatcaaacgcaccatgcagcagcagctccaatatcaaccgatgttcggccagcatggctggatccgcgccgatccccagcaagcggtagaaaatccggctgatgatcattgggctctgaccttggcggatcaacgccgcgatcttgcggttctgcaggccggccaggcagcgttggtgcaagtcttcctcgatctgttcgatggcctccagactgcagtgggggctgtcctgagcggcctgcacgcgctgcaacatggcttcgagcaactcgcggtcgaggtggggcgcgctctggcgcagcgcttcaggttccaggcaggcgcgcagctcgtagtcttcggtgacttcccgtgctgtcaaaggccccgccagccattgcgagtagggctccttttccaccaggccacggtcgcgcaggcgcatcagcgcttcgcgcaccactgcgcggctgacaccgtagtggtcggcggcggcttgctcgtcgaggcggtaatggccgaaggcgatgcaggtggacagcgccgtgccgatctcttcgacgatgcgttcgcccaacggccgcgtatccaccagttcatcctcaccgttgagccccaggtgtgcatggctcaggggcaggcgcagcggttccatggccaggccttcggggttgatcaggtaaccccggccgttgaagcgacagatcaggccttcttcatgcaacaggtccagggccttgcgcaccggcacgcgactggtgccgaacaattcggccagcggtgcttccagcaagaccaggccgtggcgcgcagtgccgttgacgatcgcgtcacgcatcaccttgtgaatcatcgcgtaacgggaggccgaggcggacactgctttcattgcattctctgggctgaagagtctggggccgaggattctctcataagtcgtgcctgtcactctgcgccacgtcggtggcacttttttggggccttgaaagtgaggatgttacttttctgcaccaaaatgtacttattaataaaagatacattatttcattgaaggcgctcctccgtgtccttgcaagatttttcctgccatctaaaagcatctatcccgctgctctgggcaaatatccctcaccgcgcacaaacgtcacgatacagactggcacggaacctgcctttgtaaaatgtacattttattaatatgtacgttttatgaggatcaagtcgatgtcagacgccacttccatggccgaggatttcgccagcggtcgcagcgacccggtgcaagtcctcgaacaggcacttgataaggccagccaaaccccggccgtgttcatcagcctgaccgccgagcgtgctcgccgtgaagccgaagcctcggctgcccgttggcgcgccggccagccattgagtgggttcgatggggtgccgctggcctggaaggacctgttcgatgtggccggcagcatcaccaccgcaggcgctgcctatcgccgcaacgcgcctgccgcgttgcttgatgcgcctacggtcggcctgttgtgccgcgccggcatggtcagtatcggcaagaccaacctgagcgaactggcttattccggcttgggcctgaacccgcatttcggcacgccgcataatccccatggcggcgaccaaccgcgcattcctggcggctcgtcgtccggctcggcggtggcggtggcggccgggatcgtgcccatcgccatgggcactgacaccgccggttccatccgcatcccgtcagcgttcaatggcctggtgggctaccgcagcagcagccgacgctacagtcgcgacggggtgttcccgctggctcacagcctcgacagcctcggcccgctgacccgcagcgtgcgcgatgcgctggccatcgacgacctgctgcatggccgtacccagacccacactgcccgcagcctcaagggccagcgctttgtgctggcgcaacaggacgctgaacccgccgtgcgcaacaatctgctgcgcgcagtggagcaactcaaggcccggggcgcacttgttgaagagcgtgaatgcgcgacgttccaggccaccctggacctgatcaagcaccacggctggctcggttccttcgaagcctttgccctgcatgaagcgctgctcgacagccccgacgccgagcaactcgaccctcgcgtacgtcgccgcctcgaagccgcgcgcgcactgcccgccagtcagcttatccacctgaccgacgtacgccgccgcctgcaacagcaactgatcgacgacctcgacggtgcactcctgatcaccccgaccgtcgcccatgtcgcacccgccctggcagcgctggaggccgacgacgacctgtttgtcaaaaccaatctcgccaccctgcgcctgaccatgcccggcagcttgctcgacatgcccggcgtgaccctgcccagcggccgcgatgcccagggcctgcccaccgggctgctgctcagcgccccgaccggagaagacgcgcgcctgctgcgcgcggcgttgtccgtcgaaaccgtacttaacgtttaaggagacacaccatggctaaagacatcctctgtgcatttggcgtcgacgttgacgccgtcgccggctggctcggttcatacggcggcgaagactcgccggacgatatctcccgcggcctgttcgccggtgaagtcggcgcgccgcgcctgctgaaattgttcgagcgctatggcctgcgtaccacctggttcattcccggccactcgatggaaactttccccgagcagatgaaggccgtggccgacgccggtcacgaaatcggggtgcacggctacagccacgaaaaccccatcgcgatgacggccgagcaggaagaaatcgtcctggataaatccatcgaactgatcacccaggtcaccggcaagcgccccaccggctatgtcgcgccgtggtgggaattcagcaaggtcaccaacgaactgctgctgaaaaaaggcatcaagtacgaccacagcctgatgcacaacgacttccacccctactacgtgcgcaagggtgacagctggaccaagatcgactacagccagcaccccgacacctggatgaaacccctggtgcgcggcgaagaaaccgacctggtggagatcccggccaactggtacctcgacgacctgccgccgatgatgttcatcaagaaagcccccaacagccacggcttcgtcaacccgcgccaccttgaagaaatgtggcgtgaccagttcgactgggtctaccgcgaacacgaacacgcggtgttcaccatgaccattcaccccgatgtctccggccgcccgcaagtgctgctgatgctggaacgcctgattgaacacatccaaagccatgccggtgtgcgcttcgtcaccttcgacgaaatcgccgacgacttcatccgccgccaaccgcgtacctgaacctttgcaaccacccctgaggcgcgacccatgtccatctacaacaagcttgacctgactggctggaaaccccggcaactgacgtcccaggaagtgcgcttcgccacctggatcgcgtttttcgcctgggtgtttgcggtgtatgacttcatcctgttcggcaccttgctgccggagattggccggcactttggctggggtgaagtggagcaagcggaaatcgcgacctgggtcgcggtgggcacggcggtggtggcgtttgccattggcccggtggtcgacaagttgggccgacgcaaaggcattatcttcaccgtggccggctccgcgctgtgttcggcgctgactgcgattggcggcgcgtggggcaagtcgccgctgattctgattcgttcgttgggcggcctgggctatgccgaggagaccgtcaacgccacctacctgagcgagctgtacggcgcctcggaagacccgcgcctgaccaaacgccgtggctttatctacagcctggtgcaaggcggctggccggtcggtgcgttgatcgcggccgggttgaccgcgctgttgttgccgatcatcggctggcagggctgctttatcttcgcggcgatcccggccatcgtcatcgcgatcatggcgcgcaagctcaaggagagcccgcagttccagatccaccagcgcatcagcgagctgcgtaaaagcggtgcggtgaaagaagcgcagaacgtcgccgtgacctacggcgtggactacgacgaacacagcaaggccggcctcaaggccgccttccgtggcccggcgcgccgcgccacgttggtgatcggtgccgcgctgttgctcaactgggcagcgatccaggtgttcagcgtgctgggcacttcggtgatcgtcagcgtgcaccacatctcgttcgagaactcgctgatcatcctcgtgctgtcgaacctggtgggctactgcggttacctcagccacggctggatgggcgacaagatcggccgccgcaacgtgatcggcctgggctggatgctcggcggcctggcgttcgccgggatgctgtttggcccgagcaatatgccgatggtggtcgggctgtacagcctgggcctgtttttcctgatcgggccttactcggcggcgctgttctttatcagcgagagtttccccaccagcatccgtgcgaccggtggcgcgatcatccacgccatggggccgatcggcgctgtagtcgcaggctttggcgcgacccaagtgttgtccgccggcagcgactggcagaccgccgcgctgtggttcggcgcgctgccgtgcttcctgtccggcgccttgatgtttgccgcacgccatgtgcgtccggaaaccgttcagtaaggagtgatcgatgagccgtaaagttgccttgattaccggtgccgccagcggcatcggccaagccctcgcggtggcctatgcccgcgtgggtgtggcggtggttggcgggtattactcggccgatccccatgacccgcaggccaccgtcggcctggtggaagaagccagcggcgaatgcctgatgctgccgttggacgtgggcaataccgcctcggtggacgccctggccgaacaggcggtggcgcatttcggccggctggactacgccgtggccaacgccggcctgctgcgccgcgcaccgttgctggagatgaccgacgcgttgtgggacgagatgctcaatgtcgacctcacgggggtgatgcgcaccttccgtgcggccacccggcatatgaccgaaggcggcgcgctagtagcgatttcgtcgattgccggtggcgtgtatggctggcaggaacacagccattacgcggcggccaaggctggtgtgccggggttgtgccggtcgctggcggtggagttggcggcccgggggattcgttgcaatgcggtgattccggggctgatcgagacgccgcagtcgctggacgcgaaaaattcgctggggccgcaaggcttggcgaaagcggcgcgggcgatcccgctggggcgggtagggcgggcggatgaagtggcgtcgctggtgcagtttttgaccagtgaggcgtcgagttatctgaccgggcaaagcatcgtcatcgacggtggtttaaccgtgcgctggcctgactgatgtacccgatccaaatgtgggagggggcttgcccccgatgacagtttgtcagccagcttatctgtagctgactctctgcaatcgggggcaagccccctcccacattggaactgtgttttctgtaggagatgtgtgtatgcctcaacttcttaaccgtcgcgccgtgatcaccggcgccggcagcggtatcggtgcggccatcgcccgtgcctacgccgctgaaggcgcacgcctggtgctggctgaccgcaatgcggccagcctcgccgaaaccgcgatcacctgccgcaacctcggcgccgaggtgttcgaatgcctggccgacgtgggcactgtcgaaggtgcccaggccagtgtcgaccgctgcgtcgaacactttggcggcatcgacatcctggtcaacaacgccggcatgctcacccaggcccgttgtgtggacctgacccttgaaatgtggaacgacatgctgcgcatcgacctcaccagcgtgttcgtcgccagccagcgcgcgttgccgcacatgctcgcgcagcgctgggggcggatcatcaatgtggcttcgcaactgggcatcaagggtggcgccgagttgacccattacgcagcggccaaggcgggggtgatcggttttaccaaatccctggcgctggaagtggccaaggacaatgtgctggtcaacgccatcgcccccggcccgatcgagacgcccctggtcggcggcatcagcgaggactggaagcgtgccaaggccaaggagctgcccctgggccgcttcggcctggcggatgaagtggcaccggtcgcagtgctgctggccagcgagccgggcggcaacctgttcgtcggccagaccctgggcccgaactccggcgatgtcatgccatgagtgaggtgtagccatgtgcggactctgcgggctgctcggcgaagacctgcactggagcgatcccctgggtgacgaactgccccggcgccgcgaacgcctgcgccggattgcggcgatcaaccaggtgctggcggtgttccggctcaaggtcgaggacttccagggcgcgtcctatctgctgttgggcgctaccgggaaacaggaactggccagcggcctggatcaactctggctagccgccgagaccatgctcggcagccctttggacccgctcgacccacgcttgctcgatcatttggaggcctgcgtatgagcatcgccctcaacgtcatcactggttttcttggcagcggcaagaccaccttgctcaagcgcctgctgcaaggcgaaagcctgggcgacaccgcgctgctgatcaacgagttcggtgacgtcggcatcgaccacctgctggtggaggaggtggcgccggacaccgtgctgctgcccagcggctgtgtgtgctgctcgatccgtggcgagttgaaagacgcgttgctcggtctgttgcaacgccgtgagcgcggtgaaatcccggcgttcaagcgggtgatcctggagaccaccggcctggccgacccggcgccgatactcgcgaccttgaacaacgatgtgcaactgcgcgggcgtttccatatcggcctggtgatcaccctggtcgacgccagccacgcgcccctgcaagaacgcctgcacccggaatggctggcgcaggtggcggcggcggatcgcctgttgttgagcaagaccgatctggccggtgactgcactgtgttgcgcaaccacttgcaggcactcaatgccggcacgccgatcttcaatacccaggacattcacagcggcgaccagttgctgctcggcgaaggtttgcgcagcgccgaacctgctgttgaagtcagccgttggcagttgcatcgcaccaccaccgccacccacggcgccgcacaagtgtgcagcctgacctttgaccagccgctggactgggtgggtttcggagtgtggttgtcgatgctgttaagatgccacggcgaacgaatcctccgggtcaaagggctgctcaacgtgaacgccagtaacgctcccatcgtcatccatggcgtgcagcattgcctgcacgcgccggtgcatttgccggcgtggccaggcaccgaccgccaatcgcgcctggtgtttattttgcgtggcctcgaccctgcgctgctgcggcgctccttcgacgtgttctcgcggcggttcgccgcatgatcacactgcgcgtcctcggcacctccgttaccctgctcgaatgcctgcgcgtacgcgccgaacaggagttgggcattcgcctggtgtaccaggtgcacgacgtcgaacaggcccagcgtatcgcggtgatgcagcccgacagctacgacctgtacgaccagtggttccacaacgtcgactttgtgtggccggcccaggcgatccaacccatcgatacgcggcgcatcgccttgtggcatgagatcaacgacctgcccaagcgcgggcgcctgtcggccgacgaccgcctgggcagtggcagcgtgcccagtgagcggctgttcgtgcagcacgacggcagcctcggcagcacagtcaccgagcgcatcagcatgctgccactgacccacaacgccgacagtttcgcctaccgccccgagcgcttgcctgagggcttctgccacggcaacgagagctggggttggctgctggacccggcttggcgtgcgcgcaccgcgctgcaaagcgacgccgccatcggcgccctggacgccgcactggcggtacagggcgcggggctggccagcttcagggacatcggcaatatgagcatcgaggagatcgacgtgctcgcggacatcctcgtgcgcaaacagaaagaagggcacttcgcggcgttctggtccgatgatgaagaggctgcgcagttgatgctcagcccgagtatcgatatccagagcctgtggtcgccgaccttgatgcgcctgcatcgcgcgggggttaagtaccgcctggcggtgccgcgcgaaggttatcgcgcgtggtttggtgggttgtcgttgtcgcggcatgccaagggggcggtgctggacgcggcgtatgcgtatttgaactggtggttgtccggctggcctggggcggtgatggcgcggcaggggtactacatcggtaacccggcgcgcagtcgtgatcatttgagcagtgcggagtgggattactggtatgcggggctgccggcgcgggaggagttgctgggcagtgatgggttgccgctgatcgatgtgggggaagtgcgggatggggggtcttatgagcagcgcatggggcatattgcggtgtggaactcggtgatggatgagcataattatctggtgcggcggtggggggattttatgcgggctcggggggggtgattggttgattgagtacatatccgttatttaggtaacggccacctatggttccgctcttacagcgggtcactttttgaagagcgctgtacggaccggacacatggttgacgggtgtacggggacatggtggacacttttcggcggataaacttcgccgggaaatcatcatgccttgggacacgagagataccatgagcctgaaagaaga

SEQ ID NO: 100 - DNA, 78512 bp, Pseudomonas nodulensis
aatcactgtcgaattacgggcacaccgagcctaagcgaggtgccgagtgttggggcaagagcgttttgcttacttttgcgctctatcaaaagtgagccgccgtaagggcggaaccaatatccgccgttacccaaataacggatatgtactcaactcaactcaacctaacccactagccaacccattgtcgccaaaaaaccgccacaaaaccctcgggttttattgggtgcacttaagcccactcccagctaatctcctgaaaccgaatattcaatccaaatggatatttttttgacgccaggtcagcagtcgcagggaatgcacatgacaaagggacgtaatggcagagagaggcgaacgctgccagagggcactgcaatgaggtggcgccacacgttccagacccgcatcgccggggtgctcgcgttgttgctgctggtggtggtagccgccacctatttctctgtgaagaccgccaccgcccgcgccatggaaaaccaggcgcaagtccagctgaaaaccggcagccaggtgttcgaacgcctgctcgatctgcgcgggcgtcgcctgcaatacggcctggactggctgaccgtcgacctgccgttcaagcaagccgtggccgacggcaagaccgtgccgattctggccgcgctgcgccgtcacggcacgggtatccgctccagcgaggtgtttgtgctgggcctggatggcaaggtcatggtcagcacgttgccgatcctcacccgtggccagtttttcccctacgacaatgccctgcgtcacgcgcggcgcacgggcctgcagatgctgatcgtggccttggatggacggccttatctgttggtgcaggatgaagtgatcgacgagctgccgatcgcacgtatcgtcatggggttccccatggacaagctgttcgccaatgaactgcgctccatgagcaacctggaggtgtcgttcctcagcgtgcaggacggccagcccggcccgttgttcagcacgcagccggacgcctaccaggccggcaccctcagcctgttgcgcgaagggcacgtcgaccccgaaccgcagatccatttgttctacggccagcgcgtgctcagccaggtgttgccactcgccaatacgggcgacggcgatgaagtgcgggtgctgttgcaaagcccgctggaccacgccctggaatccttcgcgccgctggaccggcagttcctcgggattgccctggcggtgctggtggtgtcattggccggcgcgttgtttttggcgcggcgggtgtcgcgtccgctcaatgcgctggtgcaggcggccgaacgcatcggcgccggtgactaccgcacgccggtgcgggtgcgcagccatgatgagttcggcctgttggcccgtgcgttcaacgccatgcaaagcggcatcgccgtgcgtgagcggcaactggcgcacaacgcgttgcatgatccgctcaccggcctgcccaatcgcgccctggcgatggagcgcctgggcagtgcgatcagcgcaggcaggccggtggtgttgctgtacgtggggatcgaaaattaccggctgatcaacgaaggtttcggccccgaaggcgtcgaggaaatgctgcgcgaagccagccgctgcctggccatgagcctgttggccagtgacaccgcagcacgcatcgccggcagtgaattcctgctgttgctggaaaacaccgaggtcgaccgcgccgtggcccgtgccgaccgcctctatgcattgctcaccgagccgcagcgcatcggcaatgacgaactgcgccacgaagtaagcattggtatcgccgcttaccctgccgacggccagcaagtggaagagttgatcagccgcgccgccatcgcccggcatgacgccgcgagcctgccggggcatttgcagatctaccagcaggaccgcgacctggcccatcaacgccagatcaccctgatccgcgacctgcggcgtgccgccatcgaaggcgagttgttcctgtgctaccagcccaaactcgacctcaggcacggccatgtgcgccaggccgaagccttgttgcgctggcagcaccccaccctaggccaggtgtctcccgccgagttcatccccctggccgaacgcaccggcagcatgagcagcctgacgctgtgggtgatcgaagaagcggttcgccagatcgccgagtgggcgcaacgcggcctgctgatccagctgtcggtgaatatctcggtggacgacctggccgatgatgacctggcgattcgcgtcaccgcgctgttgatgcagtaccaggtggacgccgagcaactgatcttcgagatcaccgaaagcgcgatcatgcacaacccgcaacaggccctcagcgtgctggagcaactgcgcggctgcggcatcagcctgtcggtggatgacttcggcaccggctactcgtccctcgcgcaattgcagcgcttgccggtgcaggagttgaagatcgaccagtccttcgtacgcaacctcaacggcaccagcggcgacggcgttatcgtgcgctccaccatcgagatgagccacaacctcgggctcaaagtggtggccgagggcgtggaattcgcccccagcctcaagctgctcaaacagtggaattgcgacactgcccagggctacctgatcagccggccgctgaacgcgatggcgttcgagatgtggatgcggcgcgagcgggtgccgatctagaaaagcctttcctgtcgactacaggtttttaaaacagcgtcgataacctctacagagcctgaccgaatgcataggtttttgccgaccgacggtcatgcactgccgcgaattgaatgatggcaattggccttatttgcgtcatcatgcgtgcacttcaacgtttctgtgccaaggctggccgctcttttagcccatttcctgcggatcgaccatggcttggatttttcactcgttatttcgtacagcgctactgctggccgtggtcggacccgcgtcggcggcaacgcttgaggtgttggcccagcaggccgatggtcaacctgttgccgatgcggtagtaaccttgcaaggcccagccgaggcgccgcaaggcgtgctcaaggccgacatggaccagcgcggtcagcgcttcgcgccccatgtgctggcggtgcataccggtacgcaggtgcgcttccccaacagcgacaatattcgtcatcaggtgtattcgttctccgccgccaagcgcttcgaactgcgcctttacgaaggcacgcccactgacccgctgctgttcgacaagcccggcgtggtggtgctgggctgcaatatccatgactggatgctcggctatatctacgtgaccgacgacccgcgtttcggcgtcagcgatgcccagggccgggtgcgcctggaacagctgccggccggtgactaccacctcaccttgtggcacccgcaactggccgatatgcagccgctggatggcggtaccttgcacattcctgctgccggcctgagccaccgtgtgacgttgagtctggaacccgcaccggcggatttgccgccgccgcccagcgcctttggcgatgccttcaatcgagcctcccgtgaaactgcgcaatagttttcaggcgcgggtcgcctgcgtgctgatcgtgctgtcactggtggtgatcggcgcgctgtatttcagcgtcaaggctgcgacccgttcggcggtccacggccaggctctggcccagctggatgtgggcacgcgggtattcgagcgcttgctcgacacacgcggtcggcgcctggccgatggcgtgcagttgttggcggctgacttcggttttcgcgatgccgtcgctagtggcgattcggcaaccctgcgctcggtgctgctcaaccacggcaagcgcatcaacgccagcgacatgatcctgctgggcatggacggcaaagtcctggccagcaccctggcggaagtccccgagggctcgacctttcgctacgaccaggccttgcgtgaggccaagcgcaatcgccaggcgatgctgatggtgccgttgcagggcgagccgcatctgttggtcgaagcctcggtgctggcgccgctgccgatagcgcgggtggtgatggggttcagcatggacgcggcgtttgccgatgagttgcgctcgttgagcaacctggaagtctcgttcctggcaattgaccatgaccgccccggcgagctggtcagcacccagccacaggcactgcgccaaagcattagtgcgctgatgcagggcgactcgacgcgccgtggcgtgtccaccaccgatcatcttgaacacagcttcctcagccaatccctggtgttggccagtgatgaaaacggcaaagtcctggccctgttgcaaagcccgctggatgcagcgatgcaggcctttgtgccgctggatgaaaagatcctcgggatcgccctggtcgcgctgatcgcttcgttgatcggtgccttgctgctggcgcgcacggtgtcgcggccagtgcaggccctggcgcaggcggccgagcgcatcggcagcggcgactatcagaccccggtgctgctggcgcgcagtgatgaactggggcgcctggccctggcggtcaacgcgatgcaaagcggcattgccgaacgcgaacaacagttggcgcacaatgccttgcatgatcgtcttactggcctgccgaaccgtgcgctggccatggagcgcctgggcagttcgattgccctgcaacgcccgatggccttgatctacctgggcatcgacaacctgcgcgccgccagcgaaaccgccggccccgaagcggtggaccaattgctgatgaccgtgagccaacgcctgcaggcggcgttgcgtcctggcgataccctggcgcacttgatcgccgatgaattcctgctgctgctcgaaggtgcgggcagcgacgaagcggtgggcatggccgacaaactgcaacagctgctgctgcgcccccagcgcatcaacggccatgacctagcgctggactgccgtctgggtatcgcggcgtacccggctgatggcgaaagcgcgcacaccttgctggagcgcgcggccatcgccatgaaggacgccgcgcaaatgcccggccgtctgcaaatctacgaacaggggcgcgaccttgcgcaccgccgtcagatcaccctgatccgtgacctgcgccacgcggccaaccagggccaactgttgctgcactaccagcccaagctggatattcgccagggccatgtgcgccaggccgaagcgctgttgcgctggcatcacccgcagttcggcatggtctcgccggctgagttcatccccctggccgagcgctcgggcagtatccagttgctgacccaatgggtgatcgaggagggcattcgccagttgtgtgaatggaaccgccgtggcctgtcgttgcaactgtcgctgaacatctcggcggacgatctgctcggcgatgaactggcccatcgagtctcggcattgctgcgtcgctacggtttgccggctgaccaattgctgttcgaaatcaccgaaagcgcggtgatgcgcgagccggaaaaagccctcaaggtgctcaacctgctgcgtgactgcggcatcggcctgtcggtggatgacttcggcaccggctattcgtcactggcgcacctcaagcgcctgccggtgcaagagttgaagatcgaccaatcctttgtgcgcaacctcgatgaaaccagtgaagacgcagtgatcgtgcgctccaccatcgagatgagccacaacctgggcctcaaagtggttgccgagggcgtcgaatatgcccatagcctgcgcctgctggagcgctggcagtgcgacacggcccaggggtacctgatcagccggcccttgagtgccgacgccttcgaagcctgggtggccttgccgctcagtgcgcaaacttccctggttcattgagtggcatgacggtgcgtttttctttcctgatcggttgccttggcgcactgaccctgcaaacggcactggccgataacggccgcctgatcgctaccggcggcgccagcagcctggaaggcgtggcgggcggagggatcacaccctgggcggttttggccggatatggcgaacaacacgagtggggcgccacggcgttcgcgaccacggtcaacctgccggattatcggctggacgtggccgggctggcgcttgcctatgacaaccgcgtcgaggcgtctttcgcccaccagcgcttcgacctcggcagcctggtgcataagctcaatctgcccgacgacagcctgggccaggacgtactcggcctcaaggtgcgcctgttcggtgacgtgatctacgacacgctgccgcaggtctccctgggcctggagtacaagcaccagacgaactttgctatccccagcctggtgggcgccaagcgcgacagcgacgttgaaggctacctggccgccagccgcttgttcatgggcgctgcgtttggctacaacgtgctggtcaacggaagcctgcgctatagccgcgccaatgaaaccggcttgcttggctttggcggcgatcgccgcgacactcgcaccctgctcaaggaaggctcgctggcattgctgctcaacccgcgctgggcggtgggcgtggagtaccgtgagaagcccgacaacctgtcgtttgccggcgaaagtgattgggcggatgtgttcgtggggtacttccccaacaagcatgtgtcgttcgtattggcttatgcacggcttggcgaaatcgccacgctggaccaccagaacggcacgtatttgtcggtgcaggggagtttctgatgcgctgtttaccactggttttcgccctgctactcagcgcctgcgcccagcaaccgcccaaggacgacagcctctatcgcgacctcggcgccatgcccggcatcacgcggatcgtggagggcatgttgctcaacatcgcccgggatgagcgcatcgtcgaacgcttccggcgcattgatgtacagcgcctgcgcaacaaattgatcgagcagttctgtgtggaagcgggcgggccgtgcacttataccggggatagcatggcggagagtcacaaggggcagaatgtgagccgcagtgacttcaatgcgttggtggaggatttgatcaaggcgatggacagcgaggggatctcggtaccggtgcaaaaccgcttgattgcacggttggccgtgatgcgcggggatgtgatcgaacactgatcccaaaaactacccagataaaaatgtgggagggggcttgcccccgatagcggtggttcagtcacaaatgcattgactgacactcagcaatcgggggcaagccccctcccacacttacagtcctcatgccggtgtcgcttattccggcagtttgaacgccatcacatagtcaccctgcttggtgcccagggaaccgtgaccgccggccatgaccagcacgtactgcttgccgtccttgccggtgtaggtcatcggggtggtctgcgcgccggctggcaggcgaccttcccacagttgcttgccgtttttcacgtcgtaggcgcgcaggtactggtcgagggtgccgctgaggaacgccacgccaccggcagtggtgaaggtgccgcccaggctaggcacgcccatggtcagtgggactggaaccggcgagctgtcacgcacggtgccgttcttgtgcatccagatggttttgtgggtggtcaggtcgaccgcggccacataaccccatgccggtgcctggcacggcaggcccattggcgacagcatggcttcgaggatcacgccgtacggcgcgcctttgtttggctgcacgccctcggtttcgctgacacgcgggccttgcttggcgatgtcggcggccgggatcagcttggacttgaacgccatgtagctcgggttcacgaaggcgatctggcgcaccgggtcgacggaaatgccaccccagtcgaacacgccgaagttgcccgggtaaacgatcgaaccttgcagcgatggcggggtgaacgcaccgtcgtagcgcatggatttgaaatcgatgcggcacagcagttggtcgaacggcgtcacgccccacatgtcacgctctttgagcggcggcggcatgaagttcaggtccgacttcggttgggttggcgaggtgtggtcgccagcaacagcgccttgcggcacggccacttcgtggatcggcacgaccggctggccggtggcgcggtccagcacgtagatgctgccttgcttggtcgacgccatcaccgcttgcttcacgccggcttcggtcttgatgtcgatcagcgatggctggccgcctacgtccatgtcccacaggtcatggtgagtgaactggaaggtccacttcacgtggccgctgtcgatgtccagggcggtgaggccggcgctgtatttttccgagtcttcggtacggtcgccgccgtattggtcgggcatctggttgcccatcggcaagtagagcatgccgagtttttcatccacggcgaacatggaccacatgttcggcgagttgcgggtgtaagtcttgccctctgccaacggggtggtgtcgtccgggttgccgctgtcccagttccacaccagcttgccggtgtgcacgtcgaacgcgcggatcacgccgcttggctcgtcggtggagacgttgtcggtcacgtggccgccgatcaccaccaggttcttggtcacggccggtggcgaggtggagtagtaaccgcctggggcgaagctgccgatgttggcacgcaggtcgacctggcctttgtcaccgaagtcttcgcacatcttgccggtgtcggcgttgagggcgatcagacgggtgtcggcggtcggcacgaagatgcgtttcgggcaggcgttcggtgcggcagccgggctggcgctgccggtggggctctgctcggaagcgtaggcggcgtcatcgtgatacgacacaccacggcaagtcatgtgcgcccagcctttgaagttctcggcaccctggctgctgatcttcggatcgaagcgccagatttccttgccggtgtccgggtcgagggcaatcacctggctgtgcggggtgcacacgtagagcatgccgttgactttcagcggggtgttttccgcggtggtctcgcctggatcattcgggccagggatgtcaccggtgcggtaggtccacgccggcaccagcttgtgggcgttttccggggtgatctgcgccagcggcgagtagcggtcaccgtaggccgaacggccgtaggagttccagtcgccatcggcctgggacggcgcagcgctggccatgcctggcaccgcatcgcggtccagttggccggtcttgaccatctcacccgggttggtgaactggctggccagggcggtagcacccgccagcaccacagccacgctcagcgcgccagtgcccagcggggcaggctggccacgcagcaacggacggcgaaaccacgggagcagcatgacgatacccagggcgaacagcagcgccaggcgcggcaccaactgccaccagtccaggccgacttcccacagggcccacagggtactggcgaacagcaccagcgcgtaaaggcccagcgcagcgcggcgggtggccagcagcaggacgccggtgagggtgatgccgataccggccagcaggtagtacaacgacccgccgagcatcgtcagcttgatacccccggccagcaaggccaggcccatgatcagcagcaagacgcctagcaacctgggcagcaggcggcttgggctcgaagcaccatcagtgctcatagtgtgtttctccgtgacgttggaattatgtaaccccgtgcttcactgtagatgacgattcggcacgggcttggttcagcgttaattcggtttttctggggataagtggagctatccacaggcgggcgatttatccccaggcgcaggtcggggaaagacagcgctgtctttgcgggtgggaataatcagcaagatgaggtcgaccgagggcgtgaaacgtttcagtttgttgcggcaaggataaagggagagggcttcaagagaaagcgtaaatcgcaagatgcatcatttcagatttggtaacagtgacagatagtcgctgctcagtgggttttatgaaaccctactttgtggcgagcgggcttgccccgcgttgggctgcgaagcagcccctgtcaattcaccgcattctttgagaaagactcagtgactggttttggggctgctgcgcagcccaacgcggggcaagcccgctcaccacagtaagcgggttcctacaggttggggggaaaatttttagaaggtagttcgaacgccgaactgcacacttctacccggtgccggcgcaatatcgcgcaggatcgagctggcatagcgcacggtctggttggtgaggttctcgccgttcacgaacgccagccactggctgcctcccatgttgaagtggtaacccatgctggcgccgagggtggtgtagccatcggtgccgctttcgttatccggcacgcgaccctggcccgccgcgtgttccacatcgatacgtgcctgccagcggtccagttcccacagcaagccgctgttcaaacgcaacggtgcgatacgcggcagggcttcgccggtgtctaggttggtcgcgcgggtgtagtcgcccgacagttccagcgcgaacttaccgtaggcgctttcaccaagcttccagtgatcctgggcttcaacgccggcgaaacgtgcacgcacgccggagtatttgtactcggggatgccgtcggcgtcttcttcaccttcatcgttcaacgtgcggccgctgcccaatagcccgatgtagttggagaatcggctgtagaacaccccgaagctgcccttgtgggtgccattgtcaaagcgcagcgccaggtcgctggacacggccttttctttcttcaagttggcatcgcccagctcataggtgccggtggcgacgtgggcgccgttggcatacagctcgtagaaggtcggtgcacgttcggtgtagcccagggtggcggcgacggaccacacgggggtgagggtgtagaccgcacccgaagacacgctgccggcggtgaagtcattggacttgtcggcattggcaaaacgcgcattgcccttggcatccggatcgacgctggtgtgttccaggcgtccgccgaggctgagcttgaggcgctcggtggcctgcatttcttcgaggataaacagcgcgccggcgttggtgtcggtctgcggcacgaaggcttcttcgccgagggccgagaattcgttgcgggtcacttgcgcgcccaccacgccatcgaacgggccgatcggctggtggcgcgcttccacgcgggcttcataacccttgttcttgaagatcgtaccggtctggccgccttcgatttcgcggtgctcgtagtcggtgtagcccgcgtcgagtttcaccgaggtgaacgggccccgcaggttgcggatctccgaggcgaaggcgtagtgatcctgcttcatgcggatacgcacatcctgctcggcaggggagccgtagttggcgtcgtagttgctgtaggacaacccggcataaccgtcgtcccacgtgtaggaaccgcccacggcaccgccgtcctggcgcccgtcgctgttgcccaggcggccattcttgccgggggcgtcgtcggttgccggggcgtggcggctgcgcgcctggccggggattttaaggtcgttgaattcccgcgcgttggcatccaggtgcaaggcgaacgtgccgttgccggcttccagtttgccggcgctgctgcgcgtggtgtcggcgccgccgtagcgcaattcaccggcaccgtggataccttcgatggcttcggtggggatgcggttgtcgaaggtgttgaccacgccacctatggcactgccgccgtacaacagcgctgccgggccgcgcacgatttcaatgcgatccacgttgaccgggtccagcggcaccgcgtggtcgtaggacagcgacgacgcatccagcgcgcccacgccattgcgcaggatgcgaatacggtcgccatcctgcccgcgaatgatcggtcgactggcgcctgggccaaagtaggaggacgacacgcctggctgcttgttcagggtttcgccgaggctgcctttttgttgcagggtcaggtcgtcgccttccagcacggtggtcggcgaggcaagttgctcgctgcccagcgggttgccggtgatgacttggggttgcagctccagggcatgggcttcggagcagatcagcagggcggcggcaagcggggtcaagcgccacagagaagagcgggacatcggacattccttggtaaaacggcgaaatgattggagatttatagttacaatataacatctctttttcgctgggaacgggaacttttttgatcgtgctaaagtgcgcggctgtgtgatctctttttaaaggcccggcatgaccgcgacaagcaacgaccctctacacggcgtgaccctgcaacacgtcctcaccaccctggtggaacattacgaatgggcaggcctggccgaacgcattgatgtgcgctgcttcaagagcgacccgagcatcaagtcgagcctcacgttcttgcgcaaaaccccgtgggcgcgggaaaaagtcgaagggttgtacgtgaagctgatgcgtaccaaacgcccgctggattgatccgatgaagcggtttgtggctgcggcggcgctggccggttgggtggggttggcgattcagcaatacctgattttctattcgcgctggacgtccggcgccagcctgctgggtgggctggtcaactttttcagtttcttcaccgtgctcaccaacactctcgccgtggtggtgttgagctatgcgctggtgaagcgcgattcacccgccaagcggtttttcctcgcgcctggcatcagcagtgggatcaccgtgagcatcgtggtggtgggcctggcgtacagcctgttgttgcggcatttgtggcaacccgaaggcttccagttcatcgccgacgagttgctgcacgacgtgatgcccgtgctgttttttatctactggtggcggtgtgtgcccaagggcaacctgcacctcaagcacatcggcggctgggtgagttacccgctggtgtacttcgcctatgtgctgctgcggggggatttgctcgggcagtatcagtacccgttcattgatgtgggcaccctcggttatccacaggtattcgtgaacgcggggggcattctggcggggtttatcgcgattgcactggcagtggtggggctggacaagctcatcaagccccagccctgattcactcttcttcgctgccttcggcgcgccagtaaccgacggccttgaggaacgcctcattgatctggtgcgtgtccagcaacacgcggcgtacctggcgtgacagcttggtttcggtcgccacgaagctgtacaacgagccactcggcagcgtcagtttgcgcacggtgtcgagcaggtcatcctggccacgaatcacccagatcacctcgacctcggcagcactttgcagcgcctgcttttcgcccgcattggcgatctcgatcacggccagcacgctgcgcccggccggcaactcttccaggcgacgcgcgatggccgggatggctgtttcatcgccgatcagcaggtagctgtcgaagatatccggcacgatcatcgagccccgtggcccaccgatatacaggtgttggccgaccttggcctgctcggcccaggtcgacgcagggccgtcgccgtgcagtacgaagtcgatatccagttcaccgatgtccaggtcgaaacgccgcggcgtgtagtcgcgcatggccggttgcggcccgtcgcccttgatggcgaacgtcgggctttccagggcggcctgttcggcggcgttctgggggaacagcagcttgatgtgatcgtcactgcccaggctgacaaacccggccagttccggcccgcccagggtgatgcggcgcatgcgtggggtgatgtccaccacccgcagtacttgcaggcggcgacgtttgatttcgtgggtaacgcgatggatggtttgtgtattcatgggtttttcccgtcgacaatggcttgggcggtgctattgagcagcgccgcgacacgcacgatttcttccgggctccagcgcccgtggtgcgaatgcaaggcatggcgcaggttgtgcaccgcctcgtggatttccggcgggcggtcctggccgcgcagtgcgcgcttgctcacgtccatgcgcaggcgaataccgtcgagggcaaccgtctgctcacttaagaagagacgaccggcgtcggtgattgtgtagcgtttttttccgccttcggtgtcgccgctgatcagttcgctttcttcgagaaaggtcagcgtggggtagatcaccccgggacttggggtgtaggcgccgtcgaacaggctttcgatctggcggatcaggtcatagccatggcatggctgctcggcgatgagcgccggcagcagcaatttgaggtccccgggggcaaagacccgcgggccacggccaccgcgttcgcggccgccgtgtttttcgaagccttcgtggcgttcgtggcgagggtgatgttctctcatttctgtgttctcctgtcttactaagatacaacttaagatatatcttataagccgggcaagcacagcagaccaacggtcatccgcggaacgtttctctaagggatgtaactctattcagccgcgaggcctgtactcggtatgcacaaggtctggctgccgggctgcaagtaaggcatgagcaacggcgccatgcccttgagtacctgcaccggcagggccgaagtgaaggtgaaatgttcggcggactggccggggacaaacgcggtcaaggtgccgaaatggtgctcgcccagatagaacacaaacgtggcggtgcggttgatcgacttggaactcaggatccgcccaccggcgccgatggcttcgatgcggttatcgccggtgccggtcttgccacccatggccagcggcgtgccgtcggccagcttgaaactgccggcgacgcgtttggcggtgccggcatccaccacctgggacaaggcggcgcgcagggctctggcgacctcgaccgggatcacctgcttgccgggtgccgggtcgttgaccaagtgcgtttcgtacggggtgccggcagcaaatagcaggctgtcgatacgcaacaccttggggcgcacgccgtcgttgaggatgatccccatcagctcggccagtgctgccgggcgatccccggagctgccgatggcggtcgccagggacggcaccaggtgatcaaaggggtagcccagggcctgccagcgctgatggatgtcgaggaaggcctcgatctccagcatggtgcgaatgcggctgtcgcgcgcactctggtgacggctcttgaacagccagctgtacacctcctggcgctcgaattggctggccttgaccacctcgctgaacgtcgcctcgggatggttgagcaggtagccgagcaaccacaggtccagcgggtgcaccttggcgatgtagccttggtcgggcaaatcgtaggtgccggggccgtagtccttgtagagtttttgcaggcgttcgtcggtgagcttttcgttggttttcacgccggtcaggtgtgagcgcacaaacaggttgaagctctcctggctggcggcgggcagcaggtagcggtgcacggcggccaggcggatcggcgtggggcgcaggctgtcgaggaaggtgtcgaggcgggcctgggtgtctttcttctggtacttcttccagaacttgcgcaagaacgtggtgccttcgcggtcggcgaacccggcgaggtattcctggcggcgcgggtcgctgtcgtccttgagcagttcggcgctgttgttctcccctgaataagtgacatagcgcaccacatcgcgcatcagccgaatgaacggcaggttgatcgactcgcgcaaggcgtcgcgcagggtcgggctgcggccgttgtcctggctgcgaaagttatggaagctgtgcaagcctccgccggtaaaaaagcgctcgccggggctggccgagtaggtgcgatccagtgccgcgtcaagcatcacggccagagatttgtccggggcctggatcaggtaatcgagggcccagcggctcaggcggtcctggtcgtcgaccgtgacttttttcagcgcggcgggggcttgtgcggcgtacttgccgtgcagttcggcgatgatttgcaggtaggtggtgagcacccgcagcttggcggtggagcccagctccagcttgctgccttcgttgatgtcgaagggttggtcggtgttgtcggtctgcacccgcacccgtgaaccgtccggggtcagttcgaacagggtgaagctgtagcgcacctgggcggtactggcgggagtgagcagacgctcgccgagcaggccgatctggcgggcatactcggggtcggccaggtgccggaggtaatcgctgacctggctttgcaactgcgcgtgcagggtgctggtagccgataggtcgaggcggtcgaggtcgtacagcggccggtcgagcagggcggccaggcggccacgggcgacgctgatgcctttgttggtctcgatgggttgtaccgtcggttgttgctgccagtcgcggtaggagacttttgcgttgagcgccgcccgcaacaacgccggctcgatcacgccgttctgggccagcaggcgcaagtggctgtcggtgagttgtgccagttcctcgcgccccttggccagataatgcgacgggcgccgctgggcgatgatcagtgacaacacctcacgcagggccaggccttgctcggcgctgacggggccgaccagcgcctggttgacctggttgaaatccgcgccgtaccacacccgcaatccctcggccatgccgtgcacttcaccatgccccggcaccgccgacagcggcacgctgttgaggtagtcacgcacaatgttctgccgcgccggcagggtgtcgggcccgtcgtggtaagcgcgcacggcggcggaaaacatctgccgcagtttctccccaccggacagggtcagcccatccggcgagtgacgatatttctccagttgggtggccagggtgctgccgccggcactctggccaggcaggtgcaacagcttggcgacttgcgaccaggccgccttggcgaaacgcggccagtccacggcggggttggcctggggttgggcggggtcgagcagctcgcggttttcgatgaacagcaggctgttcacgatcagtggcgggatggcggtgaagctggagtacaactgttgcgggtagtcatattggtacagcggcacggcgcggcaatcggtgatggacaacccggcctggattttctcggcgtagggcacaaacaggcccttggcgctgtaatccatcaatgccggggaaaaacgcgcctgggcctcgatcacatacccacgcttgagcaagcgcggcaaaaaggtgtcgaggtcactgtagcccaggcgccgatcgaacgggccggcaccgggatagacgattgcatcgctggggccggacttgacctcgtaggtcaggtcgcgggccaggcggctcagttcctgggcctgcaagcgcgcggtgcgcatctccctggcggcggcaaaccccagggcgatcagcgccatcaacacgatcaaccagaacaggcgacgcccgtagcgtggcctgggtttattttcgggtaaaggcgctgtgtccgaactgccttgtactttcgcagccttggtcgattcggtttgccacagtgcgcccatagtcgattgatccattcacgcagattgatcggacttgcttgaagcgtagtcgctgggcgctgtttgtgagggaaatgtgattttcgagtaagaatcctctgacgcttgcgtagtacgctgcccgacgcgacgttttgtcgctcaatgcaggtcagatgctcctgttaaattgcaatccggcgggcacttccactaaattgcctcgcttttatagtgaaagaccctgctcctggctttttatactgcacgccccgctgatcttgcctggcaagaagggcccgtccatgaggcggccccggtctcggcaaggacgcaggcttaccggcccgcgtcctggagactcgacggacaatccaataacaaaatgaggttgtacccctatgccagtcggcaacccactgccccatggcgagaccgctcaaggcggcccgctcaaacgcgaactcggtgaacggcatatccgtctgatggcgctgggcgcctgtatcggtgtcggcctgttcctcggctcggccaaggccatcgaaatggccggcccggcgatcatgctgtcgtacatcatcggtggcctggcgatcctggtgatcatgcgcgccctcggcgagatggccgtgcacaacccggtcgccggttcgttcagccgttatgcccaagactatctcggcccattggcagggtttctcaccggttggaactactggtttttgtggctggtgacgtgcgtcgcggaaattaccgccgtggcggtgtacatgggcgtctggttcccggatacgccgcgctggatctgggccttggctgcactgatcagcatgggcaccatcaacctgattgcggtcaaggcgttcggtgagttcgaattctggttcgccctgatcaagatcgtcaccatcattgccatggtcatcggcggcgtcggcatcatcgccttcggcttcggcaatgacggcgtggccctggggatttccaacctgtgggcccacggcggcttcatgcccaatggcgtgcagggcgtgttgatgtcgttgcagatggtgatgttcgcctacctgggcgtggagatgatcggcctcaccgccggtgaggcgaagaacccgcagaagaccattcccagcgccatcggctcggtgttctggcgcatcctgttgttctacgtgggcgcgctgttcgtgatcctgtcgatatacccgtggaacgagatcggcacccagggcagcccgttcgtgatgacctttgaacgcctgggcatcaagaccgccgccggcatcatcaacttcgtggtgatcaccgcggcgctgtcgtcatgcaacggcggcatcttcagcaccgggcgcatgctctacagcctggcgcagaatggccaggcgccggccacgttcgggcagacctccagcaacggtgtgccgcgcaaggcgctgctgctgtcgattttcgccttgctgttgggcgtgttgctcaactacctggtgccggaaaaagtctttgtgtgggtcacctccatcgccacgttcggcgcgatctggacctggctgatgatcctgctggcccagctcaaattccgcaaaggcctgagccccgccgaacgggcagggctcaagtaccgcatgtggttgtacccggtcagttcctacctggccctggcgttcctggtgctggtggtgggcctgatggcgtacttcccggatacccgcgtggcgctgtatgtgggcccggcgttcctggtgttgctgaccgtgttgttctacgtgttcaagttgcagccgttgaacactgcccagggcgccacgcgctcggcgtgatgctcaattgacctgctgttgtgccagttgcgccgcttcggtcaactggcgcaccaggcgattgcgttcggcaatctccagatccaccagggattgccgacgttccagataggcctccgagcgcttgtccgcgatctcctggttcaggctgttcaattggtgactgaccacgttctcaatggtcgagaagggctccgggtaactgcgggccaggtactcgatccagaattcctccatcaataatgagttctgcgccgcctgggtgttgctcagggcctccagggtacgacgggcagcagcgatgtcgtgttcatcgacccattcctccaccgcatacagcatttcttcgcgacggatcggcagttggaattgcgcgcgaaaacgcagccggtagtacagcttcacttccgcatcgtccggttccacccctgcttcgcgcagagtctggatgtgtctctcggccaattggtccacctggcggatgtagaacagctgcctggccaacttcagcagttcacggtcggcctggttgctgccggcgtgggaccgggcctggtggacgaggtgttcgatctccatattgataaaagccaggatggcgccgtcgccgcaggtgccgtcgaggtaggtgttgagaaacacccgctcgcgcagctcggtggattgccccatggcatcgagcaggtgccagacccgttcggtcagggcctgctggctggccgggctgtgggtgtaggcatacgactggggcaggtcgcgcagcacccggaacgtgtcatccgggctggcaccctcgttgttgcgcaactgctcccacaaggtctgtcgtgcagcgtgctgctcgacaggcacgccggccagccagcggctgaagtcaatcgacatggcctgctggtgcaagatgcccggtaacgttccaccgatgacaatcccggtgcgatggcgatagtcgcggatcctcgccagggtggtctcgctcaagggattgtcatgcaggactgtgttgcggttggtcggccccatgcgcacatcggaaaatacggcgtcgggaatcgtggtcaagcggttttcctgcaatagcaggtggcgcaggctgctgcggctttcggcgccgatgggccagtgttcaatgttggtctggcgcagcgccagtactcgcaggcggctcatgcgcgagacatccggcgtcagccccagggggttgccatccagatggagttcgttcagtcgggtcatgttggccaatcgctgacgcgactcgcctgtcagtacgatcgcgttgtcacgcaagtccaggtgctcaagctgggtcatctgagtcaggctggcgggcagctcactgagcatgcagtcgatcttcaagtgggtcaggccggtgaatttaccgaggaacgcgttgcctgtcggcgggaaggtatcgccgtcgatccgcaggtattcaatgtgttcgaagccctgggtgctcaagatgaagtcagggtcgggcaggctgttgccgttcaggcgcagttgcagttgatgcgtgtcgaacaagcctgagtcattgtcataggcaacacggctttcctggcgccaggcgcgcaggatgcggtcggcgagttggcggcgtacaccgtagttccaacccaccgggtcggtggctgggtcgtcgacggcctggggtgtttcgatccagcgctgcaattcgaattgcagggactgatattcggccttgcgccgttgcaactcgatcaacgccgccggctcgctcatgtccaggccgtcaatcagttcccgggcgcggaactggctgaagctgggatagagttcgcgcaccttgcccaccaggtccacaggttgattcccactgaacggccagagcccccgcagcgagaacggataggcgatgaatgaactgtcgacccgcatcggcggttgcagccaatacgggatatggggcaggccgagcagttgcttgatggcgatgcgctggttcagcgccagttcggcgatggtgtgttgcaccggggacaggtcgccgccatcgacgatccccaatgccttgcactcggcgtctgacagcaacaggctgatggcgttgagcaagtcgctgccgacctcggcaggctcattgagcaagcggccctgcttgtcgtaggcgtggaacccaccgttgaaccgggcgagtgtgcgccggtcgatgccagcaggctggcccgcgctttccagcaggcgaccgttggcgttgccgtcgtggatgtccaggcgcagttgcggcggccagccgggcagatccttgagcaggtgcaaggtgattttttcgctgtcggggttggccagggtcttgaggtagaggccctcgaaggcgcggttcaggcgcacgtcatgggcggtgagccgagcctgttcggccaggcgcaggccgacttggctgtgatcctgcagttgcttgagctcctgtgggctggcctgttcgaggatggccgtgaccgcactgcggggcatgtgtggaaaacgcgatttgaagcgctgttccagcacgttgccgccttgctcgctttgggcatacaggttgtcgaacaattgcgcgcgttcatggtaggcatgctcggcaattttcttcgccagtttgaacagacgctcctcctcggaggccggcagttcactgagcagtgcgcggatcagcgcatcgttgcgtaccagctttttcaatggttcgcggctgcggctttcggcctcggtgaggcgtatggtctcggccgaagggttgcgcgtggcggggtattggcgaatcaccgtgccttcgctgtcgacgatctccaggcggtggctgccaggccaattgggcaggcggctggcgagcagcaactgcagggaaggccgggcattctgtgtggcggagtaggtgctcatggcctcgataaagtgcaggatgtcgcgctcgatgcgaaagcgtttgcacgtgtcttccagtaacggcggcggtgcctggtgggtgctgtgcacctcgcgcagcgcgcgagcaggcgtacccgtgattctgaggatgcgcgcggcggtgcgctcgtcgacgttgtagtcctgggcgcccaggcgatagagcaggcgatggtcgctccaggccatcgggttttcgctggacaggcgccacgcgccacgcccgttgtgttccagcaggggcgtatcgacgccgaccttgctgggatgcttgagtcgccacttcaacacgcgggtgtcaaactcgatcgggtacagcgagccgtagagcggcagcaggtgttgcccgtccagatcgtagagacccttggcgttgggctgcgcccccgttggcagtaccccatcgtattcgtactggcgcagcgaaaggtcgagcaggctgacatagccgcgcggactgcgttgggcactcatcagattgccgagtgtatttcgcaacccctgtgcatcagaggctgattgcatgcccagcttcagccgctcgtggggttgcagcaccgagccgatcgccaggtagaaactgtcgacggccggcgacaccgggatcggcccgccgttgcgcatgtcgtaggcttcatagcggccctcgccgtaatgcagcagctcgaccgtggtgtcgtcggggcccgtggatacatagcgtggggtggccttgctggtggcaagctcggtgacgacgaactgtcgatccaggacttcgcgcagcaggctggtggcaaactcccgggcccattgatcgttgtcggcatggaacacgcgcgggtggtacaggctgtcgagggccacatcgatgcgcagcgcggcgcggtggtggtccaagtggtcacgtaccgactgcggcaacgtaccactttgcaggaacgtggcctgctggctcgcgttcaagggcacgtcttccagcagctgtgccaggttggccggggtcaatggcgcaaacctgtcgcgcagtttgcgcagcacgggcgtgatgggcaccagcggtggcgcgaccttcaacgggataaacgcgcgcgcggtgtccgcggcgggcagttcgtgccgggcatgtccggcataccggtacaaggcgctgaacagtgccagccggtgagcctgggccaactcgctgatttgcagccgcacacgcgcaatgcgttgggccggcgtcaagttcgggctgccttccctgcccagtagcgaatttgcaggctgttggtcgatgatcagctcgaacagttgctcctgggaggtgaccgtcgtgtcggcgccgtcgagggcgatgtaggtgccatcgtcgcggcgtttgagcttggtgatgctgcctgtggccgctggagtgtccgtggcggcataggtttcgatgagcgcgccttgggcgtcatacacctggatggatacctcgctgggccacccaggcacttgcgtcaacaggcacagcacggcgccatcggcatggggcggcatgtagccgcgtcggtggaagtcgctgatcaactggtcgatcacccggtcgacctgcaagcgcctgaccccttcgatcaggttgatgggcgccagttctccggcccatacgctgtccagggtgctgcggctgggcgcgatgctgcgcagcatgtggtccatgtccaccctgggcaccgggcttgaaccattgggcagcatgcgctcgatcagttggatgtccgacagggcgtgggcgttcttcaggtccagggtccaggcttgcagggccgggttgaacacgattggtggggcggcattgctgccgttttcctgtttgagcacaaaccccagggccttcgggtcatggtcgacttcaacgacccgttgctgttcgccatgtttcaaccacgcgtattgcctgccattgatctggtagacgccctgcgcgttcggcgtctgcccgttgagcaggttttgatcaaggatcgcgtacgtaccgatgtcgggtttccagaggacagcggtgccgtcgctgcgggtcagcttctgcggattgcccaagcgttgcaacaaaccctggatgcgctgctggtgcacccggccggccgtggagatcagcaggccgttgatcgccaggtccgctacatccgccatggcggcagcaaaatcactggcctggcctctggcaacttcgttgaaaccgatgatgacgctgtaggtgaggctgccaaataccaccgcctgcatcacccggttcaaaccggtgacgccgccgggcatgggtgtcagcaatagttgcaggatttcgtcggcgatcgccgcagcacctgccatgaccgcttgcaggtcacgggtcgagcgacgggttgccaacgtcgcgagattcgcctggtagtgctggatgtgacggtaggtgagggcttgcgccaggctttcggtgcgcccgtgtttcgggtctggcgtgaagcgcaggccgtccagggtcttggccgggaacaggcggtggaaggtgtcgtacaggaagcccgcggcggcactcagattttccgggcgctgctcactggcgtccaggcgtttgaacccctgcatttcggtcatcggcagttgccgtgaaaaccagcccaggtcgtgcctgcgatggccgtccttgagttgttgcatgaagtgggcgttggcggcgttggcgtccgcgtgatagtgcatcgcgccgccgggacggaacgggaaataagacaccaccccgaggctgcccacgcgaatcagcagcaggggcaccgggatggtctcgccggacggcacgaacggcaccgccggcagcagcgtgacgccggtgctcatcccgagtgtttcaaattccagtgccgggccactgccatcaatggcttgggtcaggcggtcgtagagttcccgggtgagcccggtgacggcacggtttcggtaggcttccaaggcttcgaacctgaggtttgcgagtgtgctctcgtgcagcagccgttgcagttttccgtccttgcccaaggtcgccctgagggtggtatccagttgcccaccgaggtccaggtcgcgggcgatgtcgacaaaggctttgacggtcagcctggggttttcattgcccgtcaggtaggcggcatcgatgaaggtggtccccgagcgctgcggtgtgctggtggcgaagtcgaaattcaggcaggccgcctcccacaacgacaggctggacacgtgcgagcgatatttccattcgtcgtaggcgcggcgaaagcgccgcaggttcggcgagagactggtggtgctggtgcgcggttcccagggcagtggcgcctgcacttcctccagatagcgggtgtgcaggaacacttgcagagggtcctgattgccgatgcgctcgcgcaatcgggccagcccctgggtcttgaacgtgttgatcaggttgtggttttcggactccactgcggtaagcgcctggagcgcttcgcgttgcagccgtacataagtgcgctgttggtccggggtgaggctgtcgagtgtaagtgtgagcgtgcgctggatctgttccagggcttgttgttggccccaggcgtcactcgattgcaggttgcccgacagaccgttgagcagttgatgggttggcatggaccatttcctttcaccgttgaagtggaaggaaatggaatcaccctgccggttttaccgggcgctacctatgtagcgcgggcttggcgaccgcgtccaggcgcttgagcatgtccagccagacggcgaggcccaccatcaacagcgcaccggccacggcggtggtcagttgcatggccactgcatcgttggccaaggcgttgagcatgtctgccaagggcgccagcaccacccccaggcagaacacttccagggaatagcggcccatgcggcatacctcagtggcaacacggttctgcgtccagccgtggtggggcaacagcttcgccgtgacgtaggccagggcgaggaaatgcaagagccgcaccggtgacaaatcggtcttgctgatcgggtacagcccgtcactgagccacgccggcatccacgcgtcgtgcacttcgggccagcgccacgacagggtgatcaccgctgccagcaacacatacagggcgcacgcgacaaacagcggctggcgcgacaaggggcgtacctgcgccgttttcggccgctggctgtacactgccgccgcgccgccgagcacgaacagcaactgccaggtgaccgggttgaagtaccacacgccgtcggcaatcgcgcgcaggttccagcccatccaaggcgccatcaagtagatcgccagcgacacggccaccacggcctcgaccttgcgcatcatcatcggcagcaccagcggcaggccgcccaacagcacgatatacagcggcagcgggtccatcaggttgggcttgaagcgcagcagcagttcgtcggtcagcgcctgctgcgggtgggtgacgaagtgtgtcaggcccatttcctcgaccaggtcgcgggtttccacatggctgttggcaaagaacacgatgcccatcagcagcgccagcaaaaagatatgcaccacgtacagcacccaggtgcgtcgcaggattttcaaactggccagccagtagccgtcgcgccgcaggatcttgccgtaggcgagcacggcggcaaagccggcgaggaacacgaacacctccgcagcgtcgctgaaaccgacgttgcgcaaggtgatctggccgagagggttgtgggggacgtgatcccagaaaatgaagatcaacgccaggccccgaaaaaaatcgatgcgtgggtcgcgtccgtcaggcatggctacgggctcttgaatatcaggtttaacaaggacaggtgagcgtgggcgttgtcgtacgccgcacgtcgggcgggcgcaggttggcggtatttgtaagcaattgcaaaggttgggtattactgaatgtctctagacatcaatgatgacacgcgtgccatggcggccgccgagcaaggcgtgagcgatacccgcttccacccggcccagctgcgtcgatctccaactgtccggcagttgcccggcgatggcagcgaagtctagtaacggcatgtgaatctccttgtttcaacgatgccgtcggtggtccggttcagcggtgaaggtcgttatcttgatgtcacgcggcgctggcttcgtggggttcaaagctgtccgcccgcgccatctgccacatccgcgaatagaactctccgttcacttcccctgtgagcagttcgccaggcttgaggaacacatgcaactgcgagaacaacttgatctcggtcgccgacatacgccgcaccaaatgcttggccgacagttgcgatggatgctccaggcccgccgccgcgagcatttccgccagggccttgagggtgttgcggtggaagttgaacacgcgctgggccttgtccggcaccaccagggcgcgctggcgcagcgggtcttgagtcgccacgccggtcgggcatttgttggtgtggcagctttgcgactgaatgcagccgatggcaaacatgaagccgcgtgccgagttggcccagtcggcgccgatggccagtacgctggcgatatcgaaggcgctaacgatcttgccgctggcgccgagcttgatcttgtcgcgcaggttcagccccaccagggtgttatgcacgaacagcaggccttcgcgcagcggcacgccgatgtggtcggtgaactccaccggcgcggcgccggtgccgccctccttgccgtcgaccacgataaagtccgggaggatgccggtttcgagcatggccttggcgatgcccatgaattcccacgggtggcccagacagaacttgaagcccaccggtttgccgccggacagttcacgcagttgggcgatgaactgcatcagttcgatcggtgtggagaacgcgctgtgacgcgacggcgagatgcagtcttcgcccatcaggatgccgcgggtgtcggcgatttcctgggtgaccttgtgcttgggcaggatgccgccgtggccgggtttggcgccttggctcatcttgatttcgatcatgcgcacttgcgggttctgcgcctgtacggcgaagcgctccgggtcgaaacggccatcgctggtgcgacagccgaaataaccgctgcccagttcccaggtcaggtcgccaccgttttcgcggtggtaggggctgatgctgccttcgccggtgtcgtgggcgaagttgccaagcttggcgccctggttgagcgcgcgaatcgcgttggcgctcaatgaaccaaagctcatcgccgagatattgaacaccgatgccgagtacggctgtgtgcactgcgggccgccgaccatcacgcgaaatgcgctggggtcgctgagcggtgccgggcgcatggagtggccgatgaattcgaagcccgactggtacacgtcgatcagggtgccgaagggtttgtcggcgctttcgttcttcgcccgcgagtagaccagcgagcgctgggcgcgggagaagggcagggcatcgctgtcggattcgagcaggtactggcggatttccgggcggatggcttccaccaggtaacggatattgcccaggatcgggtaattgcggcgcacggcgtgggggctttgcagcagatcgaagaggccgatcaggctcaacacgccggtgaccaccgtgatgggccacagccattcgtgttcgataaaggggaggctggcgagggtgaagatgacgcacacggcaaagaaggcgtaacggcttagcaaggacaggctcatacggtttccttgggttcagactcttttggtcggtccggcattctgcgcctgtaaggaaaccctagacaacctgtgggaatgttcaatttgacctgctggatgagacggactggcctgatatagagagcttgcggctatcagtgacttcgaagtgggcctggttgtcggtggttgaatcacccccaacgaacagggtgaaggtgccggcttccacccttgactcaaaatccgcatccagcactgcaaagtcattagcatcgagggtgaaaaccacctcctgcgtttggccgggtcttaaatgcactttgcgaaagccgcgtaactggcgcacagggcgggtgacgctggcgacagtgtcacgcaggtacaactgaacaatttcatcgcctgcgcgtgagccggtattggtgacgttggtccgtacagtcaaggtttggctggagctgaggcgcgtgctgctcaattgaggcatgccatagctgaacgtggtgtaactcagaccgaaaccgaaagggtataacggggtcgagggttgatcgatgtaacgcgatctccaactgtcgtcctcgcctacaatcgggcgtccggtgtttttgtgcgcatagtagatgggaacctgccccacgctgcgggggaaggtcatgggcagtttgccgcttgggtttgtgtcgccgaacagtacatcggccacggcgttacctgcttcagtacccagaaaccaggattcgatgatcgccggtgctcgctcaacggtgccggtcaatgccaatgggcgcccattcatcaggataacgaccacgggcttcccggttttcaagagagcccgcaagagggaattctgggcgccgggcagatccaggctggcgcggctgttggcttcgccgctcatgtctgaggtttcacccaataccgcgacgatcacatcggcctcttgggcagcgttttgtgccgctgcaataccctgggtgtcctggcttgacggtgaagcgccgggcacatagatcactcgactggcgggggaggcggcgttctgtatgccttgcagaattgagaccgccccaatgggttgctccacagccatacagtttttcaggctggcagcgacatccgttgcgaggctgccgacgaccagaatcttttgaagatctttcgacaagggcagcaatgaatcggcatttttcagcagcacgatggacttttgtgcggcttctcgggcaagtgcgcgggcttgcggggtttgagacagcaagcgttgccgggttacatcactgtagcgatagggatcatcgaacaggcccagccgctgcttggccttgagtacgcggcgtacggcgttgtccacggtcgccatgggcacttggccgctcctcaccagataggggaggttctgcctgaaaaactggttggccatttctatatccaggccagcttctatcgcttgacgtgacgcgtccaagggcgtcgctgcaacgccatgggtgatcaattcagacagtgcgtcatggtccgagacgatcattcccgaaaacccccatcgccgacgcagcacaccgtcaagcagtgcctggttgctgaccatcggcagcccctcaagttcgttgaaagccggcatgatggcatcgacgcttgcctgaacggcggcctgaaagggtggcaggtagacttcccacagcatgcgttgcgacaggtttacggtgttgtagtcgcgtcctgcttcggcagcgccgtacgccacgaaatgtttcgcggtggccaacatgaacgccgtactggtcggcccgtccccatgaaaacccattattcgcgcccttgtcatagccgcgcccaaaaacgggtcttctcccgagccctccaccacgcgtccccagcgtgggtcgcgagtgatatcgatcatcggcgcgaacgtccaatgcacgccactggccgtcgcctccactgcggcggcatgcgcggtgcgctgggtgagatcaggctcccaggcactggcttcggcaaggggtaccgggaacatcgtgcaaaaaccgtgaatgacgtctagagaaaacagcaaaggaatatgcagtcgcgagccttccaccaccagacgctgcaattgacgggttttttctgcaccgctggcgcctatcactgcgccaacatcagtcatcgccaggtgtttctggctttgcagatcaatgatggccccgtcaggggtgtccactatgtgcaacatcgtcagttggcccaccttttcttcaagggtcatctgcgccagtaggtgctcgaccccatcatcctgtgccatcgccaccaacggcaggtaagacagcagcaggatcagcagtcgacgctccatgcgtgcgttccgaggcagtgggcttacgtggagtgtctggctagcagctaacaacgtctactgtgagttctgacaggtctatgcttattgcaatcggttctcgtttggctgcattatttgtgttactgtataacgctagtttcgcactcagacgccccggaggccttatgaaagctggtatccatcctgactaccgcaccgtgctgttccacgacaccgccgccgatgtgttcttcctgatcggctccacggccgacagcgaccgcacccataaacacagcgacggcaacacctacccgtacatcccgttggacgtgtccagcgcctcgcacccgatctacaccggacaacagcgcaagacccaggccgaagggcggatcgccgggttcaacaagcgtttcgcgtcgtttggttcgagcccgaaaaaagccgaggcgtgagcacattacggcggcatgtcctacgccgccgtctgccggatcggcaacaccacccgaaacgtcgtacctttgcccagttcgctgctgacggaaatatcgcctcggtgttttttgacgatgccgtaggaaagcgataaccctaaccccgtgccttcacccaccggcttggtggtgaagaacggatcgaagattttctgcacagtctcaggcgcaatcccacagccgttgtcggccacttccagccacacatgctcgccttccacaccattgctgatggtaatggtgccgcgctctggccccatggcctgcgcggcattgattaccaggttcatcaccacctggttgagctgagacgccaggcactcgatttccggtaaggggccatagcgcttgaccacatcggccttgtatttgagttcgctggcaacaatgttcagcgtcgaatcgatgccctgcagcaagttggcgaattgccaggtctggtcattgtccacccgcgagaagttcttcaggtccttgacgatctgtatcacccggccgataccttccttggattcactgatcaggatcggaatatcttccttgagaaaatccagttccatgtcttcacgcattgccttgagttgatcgcgctgctctgcgggtacaagggcgtcttcggcctgtcggtaggcatccagcatctgttgcaactgcttgaagtagccgtccagggtgctgaggttggaggagatgaaacccaccgggttgttgatttcatgggccacaccagccgccagttgccccagggatgcgagcttttccgactgcaccagttggctttccaggtgcttgcgctcgtcgatctccagttgtagcgcttgggtgcgttgttccaccagctgttccaggtgtgcggtttgcagggaggcgcgccgggccatgtcccatttgttggccagggtgttggccatttgctgcacttcaatattgtcgaagggctttttcaggatcagcaggcgatcatgggcgtgcaggcgttccagcagatcttcccaggaatagtccgagtacgcggtacacaccaccacctgcaggtctggggcgactttccacagctcctctatggtttttgcgccgtcccagccctggggcatgcgcatgtcgacgaaggccagggcgtagggttgtttgttcgccatggccgtgacgagtagttgcaggccttcctctccaccgtatgccgaatgcaactcgaacacctgggcctgggctttggccgtgtcgccgaacagggccgactccatgtcatccagcgcctggttggattcaacggcaggcatcaggattttgcgaaagtcgtcatgaatcgacggcgtgtcgtcgatcaacaaaatgcgccggttgggcggttggttcatggggagtttccgacaagtgtgagaggaatcgtcaaggtaaacaccgcacccaggcctggcccatcgctgtgggcgctgagctggccgttcatttccacggcagccagggcgcagctgtgcaagccaaagccgtggccgtccttgcgggtggtgaagccgtgggtgaagatccgtgtcatgttttccgccggaataccttcaccctcgtctttcacgctgatctgcaaggtgtcatcggcacccggctgcacgaccagggtcatttgtcgtggtcggtcggtgaggttggacatggcgtacttggcgttgctgatcaggttgaccatgatcagcaacaaccggtgtttatccccgaggatttccggcacttgcgcgtactccttgaccaccgtgacgtggtggcggctcaaggcacctgcgttcatgcgcaaggcatcttccatcaaggcaccgatgttgaccggctccagcagcgtggacacaccggcataggattgttgggtggcgacgatgtccttgatgtggtcgacgcttttgctcagttgcgtcagctcatcggtcatgccctgttgctccacggtgatggcgtccaccaactgattcaagtagccgggcagcaatttgcctttttcatcttcggtgagaaacgtgcccaggtcagcctggcgttcgttgatcaactgcatggctttgcccaggcccagggccttgctgctgcgcaatttgcggctgaccagatcggcggagatgttcacgctgttgagtacgttgccgacgttgtgcagcacgttggtggcgatctcggccatgccggcctggcgggcgctgtccatcagttcactctgggcatccttgagttgctgggtgcgccgctccacccgttgctccagggtttcattggccgcctgcaaggcgcggttgacccggttgatctctgtaaaactgcgcaacaggcgtacggcaaggtagagcaacagcaccaccagcaaggtggagaaaatcagcaagtagcgatggtattgatggtcgatcaggtcggcggtctgctggtcctggttgaggtgggtggtcaggtcatccaggcgttcggccacgggcaccgccgcgatccgttcgagcaggttgttaaccaatggctgctcgcgcaggatcagcgaaatgtgattgctgagaatatcgaccggcgcctggaactgactgggcagcagttccttgttgaccgccagcttgcccaggccgacgagaatgtcggcggctcgatcatcactggtgacctgggcgaactccaggctgctgagcaacaggtcgtaggtgtcggtggccacgctttgcagttgctgcttactctcatcgtcaacctgattgaactgcgcctggatatcgtcttcggccgttggcaggaaggccagcgagttacgcagcactgcgttatgggatttgaactggtcgaccaacctggccttttcctggatggccgcctcgtaggcttgttgatcggcttgccagcgcggcaggtcgatggcctcgtgataggagccgcggtttttcagctcggaccacagccgagtcatttccagcaggggagcgaccagggggtcgtagttatgggtaatggagatccgggccttgagcacctcgctgtcccattgcgcattgagctgctggagttgccggatcaggtcccgcgactgggtgtaggtgacggtctggtcacgggctgacttgaggtacagaaagaccagcgtcgaggccagcagcacggtgatcaggccgagcaggagctggctggtacggcgggtggacagggtcatagcggtttacctgcccattcgcccgtcagggtcttgagaaattgaatgatcaggtctttgtcttcctgggatgggttgcgccccagttgatacttgaacatcacatcaactgcttcctccagggtcttggcgctagcgtcgtggaaatacggcgcggtgacggccacattgcgcaggctgggcaccttgaacacatggcgatcctcttcatccttggtcagcaggtagcggccaaggtccgattccaccggattgccacgggccttgaagtaatcgcccatcacgccgaacttctggaacatgttgccgccgatattgaccccctggtggcaggcaatgcagccatagtccttgaagcgctggtagccgtacttttcctggagcgtaaggatctcggtgttgcccagcaggtactggtcgaatcgtgagttgggcgtcagcagggtgcgttcataggtcgccagggcgttttgcacattggcggcggtgacgccatcggggtaggcctggctgaacgcgtgctggtaggccggcatggcggacaggttctgcaccacggttttccagtcgctgcccatttccaccgggctgatcaccacctgttcgacctgggcttccagggtgtctacccgaccattccagaactgtttgaagttcaggctggcgttgaacactgacggcgtgttgatcgcgaccggcttgccgtcgaatccgagggaaaacggcttgtcgtcggcaccgccggacgccagtcgatggcagctggcgcaggacagcgtgttgttgaccgataggcgcggttcgttgaacaactggcgacccagctcgaccttggccgggtccagcgccgcaaccgcaggcagcggcttgagtgcctcatccagtggtgccgccatcaatggcgtcgacaggcacaggatgagcatcaggccaagacggtaagttgagacatcgctcaagcgagcactccttgcaagcatagggctatgggacgggcatcaatgttgtgcagcccacttgcagcaactgggcgaagtccttcgcgggcacggccttgctgaataaaaagccttggccctcttcacacaactgggttcgcaggaaattcagttgatcgagggtttctaccccttcggcgatgatactcagctccaggctcttgcccataccgatgatagcgctgatcagttgctcgtcctggttatttacgttcacgccgcgcacgaaggactggtcgatcttcaacacgtcgataggaaagcgtcgcaggtagcttaggctggagtaaccggtgccgaagtcgtccagcgccaggcgcacacccatggccttgatggtgtgcagggttttgacggtttcgtcgacattttgcatcagcacgctttcggtgatttccagctcaagcaaatgcggcggcacgccggtttgtttcagcacggcgacgaggttgtcgacaaagtcgcgttggcgaaagtcgatggccgagatgttcaccgagatgcacagcggcggcaggcccatcgcacgccaggcctgcacttgctcgcaggcttggcgcagcacccattgggtcaggcgcacaatcaacccgctgtcttcggccacggggatgaaatcgcctgggctgacccagcccgagtgtggctggaaccagcggatcaacgcttcggcgccgacgatcttgccggatttcaggtccagcttcggctggtagtgcagcacaaactcttggcggtccagcgcctggcgaatcgcgctttccaggttttgctggtgtcgggcgcgccggttcatgtcttcggtgtaaaagctgaaaccatccgggcccagttccttgcgggtgcgcatggctgtctcggcgtgtttgatcagttccacggcattgccgctgtcatcggggtagatggcgatgcccaggctggcggtgacgctcaggtcgtgccccgcgacatgtcgtgtggcgctcacggtcgtgagtattttttgcgcaatatgctgggtttgcaggggatgctgcacatcgttgagcaccaccacgaactcgtccgcgccgtagcgaaacaccgaatccgatgcacgcacggccgccaccaggctgtggctaacctgttgcagcacctcatcgcccactggatagcccaaggcattgttgatgcgcttgaagcggtccagcccgataaacatcaccgccagttgcgtgtcatgccggtgacccaacgcaatcgcctgcgtcagccggtcgcccagcagcgtgctgttggggagcccggtgaggacgtcgtattgcagcaagtgggaaaccttgagcagctcctgcacacgttcttcgatggtgcgctccaggccaacgactttcagcgccatgtcctgtgcaagctgccacttccaggtcagggcactggccatctggcggatttccaggtgatcgaagggttttttcaggatcagcaactggtcgttgtacttcaaccgggcctcgatggcttcaaaggagtagtcggaataagccgtgcacagggcgatctgcaggttggggtcgacgttccacagctgttcgatggtctgcaggccatcccagcccggcggcatgcgcatgtcgatgaatgccatggcgtagggcgcgttggcggtcagggcccggttgaccaggtccagggcttcctcaccctggtaggcggagtccagttcgaaggcctggcgcgctttaggggcggtgccgaacagcgtttcctcaaggctctccagcgaagcctcgccattggcatcggcgcagagaatcttgcggaagtcctggtggatcgaggccgtgtcatcgacgatcaggatgcgccggttggcccttatggagtcagcagtcatggcgtgctccgtgaccacaaaaggattgactgcataacgattccttccctgatttagcttcggagcggggcgccaacctgttctgtcagcatagtcgaggtcccttgatatcgacggccagttggcgtcaaatcaaccccgcgcctcaggcgaaggaagctggccgggcacaagggttcaatttagctcaattttgtttgatttgaaggcgcggtcaccatggatgaaaaaaccactgttttgctggtcgatgatgaagagtcgattctcaacagcctgcgtcggctgttgcgcggtcaatccttcgatgtggtgctggccggcagcggcgcccaggctctggagatcatggcggcacagcccatcgacctgatcatgagcgatgcgcgcatgcccggcatggatggggcccagttactggccgaagtccaccggctgtacccggccaccagtcgtatcctgctgaccggctacgctgacgtgccgaccatcatcaaggcgatcaacgaagggcagatccaccgttatatcgccaagccgtggaatgacgatgaactcaagctgatcctgcagcaggcgcttgaacatcagcggcttgaacggctgacccaggtgcagaacgaccagctcaaggcgctcaatgccaccctggaaaagcgcgtcgcgtcgcgcaccgccgagttgcagcaaacggccgacatgctcgacctggcctacgaagaactcaagcgcagctacgtgaccggcaccgaagtgttttcgctgttggccaacctgcgcctgcccagggacaaacagaccaaccgcgcgctgatcgaactgatccgcgtgtactgcgccgcacaggccatggatgaagccagcacgcgcgacctgaccatggctgcggcgttgtacaacatcggcaaactgagctggagcgatagcatgctggtggagccggccgacaagttgcacagcaccgaccgcgaacgttaccgaggctaccccggccagagcgaatcgctgttgatgaccctggagccgatgaaggatgcggcgcggatcattcgccatcaccaggaacgctgggacggtacggggttccccgaccatctcaagggcgaggcgattcctttcggttctcgcctgctcaagctggcggtggatttcatcgaattgcaaaagggcctgatccttgagcggcagatgaacagcgatgaagcgctgctttacatccgcaagtacgccgggcgtctctatgatccggagctggttgaagattttgtgctggcctgcgcggcgtttctcagtgacgtgacgctgggcgatccaacggtcaaggtgttcaccacccgcgagctggaggccggcatggtcctggcccgcaacctcaacgccgacaacggcatgctgctgctcaacgccggcaaggtgctgaacctgccgctggtggacaagctgatcgcgttcgaggcgatggaaggggccaagtacagcgtgtttatcaaggttcccgatggggcgccgttattgacgtagcgtcttctaaacgccccagactcttcgccggctggcgtgatagtcatagatgcctttgagcagatagacatctctctcgccttccttgccggttttctcaaacgctacgcgccatgaaccgcggcccgagcctggatccagctggggtaagtcgacataggtattggcaccaatttttttccgactgatacggccgccctggatatcctggatgatctcctcaagtttgtttttggcattggtgggtaacaggggtagctgcgtttctgccagttcgtccagcttgacgatgttggtggccgcctcgctgggtggtacgggggcaggcggtcgggaaatgtcgggtcgccccgatggcttttcaactttgtgcgtgcgtgggcgtgccggggtcagttccaagggggttgaaaacttcggaatggttttttcaaattcagcgacagtgacactgtcgattacttttaagccggaggctgttccggtgcgttcgccgtaagacaatgcaatgtacggaaccccatatttcttgaagtcatcggaaatggagtcgacgccgagtttgttgaggagttcgtgacgtttttcgatcctgaacgcttccagcgcttgtttactttcgggagtggacagtaattgttgcagtgcatcattgaaggtgattttgtgattggcggctatattctcgacgatttcagttcgtcctttttcacttagaaaagccttgatagtgtcgttgttccacgtggacagttggtactttttgtcaaatttatcaaggtttttaaactgtttgtaggtgaacgcgtaccccacgagcttagcgccggtttcgtggtcagcaatactaattgacgctctgatttgttttgcgaagtcatcattttttccgatgagtctttttatttttaaaaaaagattctccagttcgataggtgagagcgtcaggtattcggataaaaagtgggttgttttattcaggtgctcataaaggtgcgcgtcgaattcaatcgttaacaatgcctggcgtagttggggcgggcgtgctgacccctgctgcccccagacgatgcgccgaaaggtgctttcatcgacattcaactgttgcagtgcgttatcccaaagccgacgtttctgaaggacagtcagttccttgagcagcgcttcgccgtgctcagcgggtgaaaacatgcgcaatgcggcgagcaagtcatcatccacttgctgttcaggcgttcgcgttctcagcacacccaacacagacccgccgccccgtgtggttcgttcaaaacgtggcttccagcttttcgcgtctcccggaaccaccatgaagtctgccttgttccccgcagggtctttgacataccgggcgccgtcttccacgtaggacgcatacagatggtagcgaccgtcgtcagcccgcatggcgataacgtgttggttgcgactgtcaatgaagctgggcgcgcccaatgtgcgcgacagcctgtactgattggcctgggcaaattcgtcgacgtcgaagagcgcatcgatctgttttggcagtcggtagctcgccacatcgacccaggccgggtccagcggtcggatcgagggcttggcgatgtcaatgtagggtgttttgtcttgaccgattttccggatcagccccgggatttttcggcccaatttctgtgcgttgttcacccctctgacgatgtagcgatgggccacgcgccgtatagccttgaacagcgacagtcccagcaggaagtcggcgacttcgacggaaaacagaaaaccattcacggctgattcaagggcaatttccgcgttggtccgtgaacggtagtcggcatgggcgagctgaaagcccagctgcgccgaatacaggtacgcatgcagatcaccggtaattggcgtcacggcatagcggtgcgcgctacgggtatcgctgaaaatccgcgccagttcccgtgcatcgccagtggccatgcgctgagtgaaataggcgcgccattcaggtttggccttcagtgcgtcgagttccaccagccccagcaccagttcccggaaaggcgcgttgtcgggagcctgcggggtgtaaaggacacagacgccgcccggcttggtgcctttgcgctggatgaccagtacgccattgatgacctggccgccctggccaccttccaatccgctccccatgaccagtgtgttggcctcgatatcggatcggccgacaggcgggcgggtggtcgagtcgggagactcggtgatcgcttttatccagtccattccaccgccgggcgtcttgaagctgaacaattcgtagaccgccgggttcaatcggctctccagcgcatccttgcgcaatgccgccgcgctcgcccgctgccaggcgctggcaaaggcgcgtccctcgccatggggcaagaaggccgacctgaggtacgcctcgtactgtttgccaacatccgcctgccgggcgagtgcacgtaaatcggcatcctcgagcctgccgcgtttttgccctgaggcgtcgacaatgtcggcgctggcgctgatcgtccggtgcagctcatgggcggaccacgggtcgatattgcgccgggcataactgccgagtgtgcgcaggtccaccacgacttttgcgttccaggtgccgaaggtcagcgtgcgctctggcagcacctgcgggatgtcgatttgcgggtcttcgctgatatacacgacgtcggaggtcgcatcgcgatagcccgtgaccttgacctccatcgaggcgctcacgcgcagcctgaccaggcttttgtagggcgccaggtcgacagcggcatattccggtttttgcagtttcagcaccttgccggtttcctgttcggcaaacacggcaaatggcgcgatgttctccagcaggggggcgagcacttcatggctgtcaatcagggcggtttcgagttgctggtactgttgccggtcggccgggctggccgctgtcagccagtcggggtcacgcggcgccaccaggcgcaggttgcggctcgccaggaccgcggatacatccagttggggcgccaggtcggcggccctgtcgaggtcgccggccagtggcaatggatccttgcgcagggtcgcttgggtattgaagtactgccgcacacgcagtgagtggacctggtctgcaatcacatccgcctcgatcagcggcgggttggtggtcaggatgggcaggctgccaacgttggcttgatcggccaatgacaggcttgcgaccagcttctggccagccgcttcgccgacacgcacgcgtgccgccacggtttcattcaactgccccaagtgctcaaattcctcgaacccttcgcttgggctatagagcatcactcgccccagtggcggtgtgccgcccgtggcattgaggatgaacgcgccggcgaaggcgctgccattctccagtgccagcctgtaggcgccgggtcgctggccggcggggaacagcgtttcccgtgccgccgccgtcgggtatttcaagacgctgtccgccagcgaccgtgcctgcgcggataaggtgccgtccgccgtgcgcaaggccaattgatgggccagtacctggcgacgcaaggcgaccaactgtgcctcggtggtgggttgatcgctctcgcggaatgtccagaactcattgagcttgatcgtcaaggctatttccagcacgccggccagtgtcgcggtcgggctggcgggggacaggcgtttgtcttcctccaccgtatcgctttcccggtagaaggccccgctttcttgtgccagataggcgtctgcgtcggggcttcttaatcgggtcaggagtgagccaagggactcgctgcccagcagttgtttttggccgtcggcgtcttcgcggtagcggttgtagaaaatccgatctggatggatgggccgaggcaagtcgggaaacaccgcggccaattgctgctgatacaccgtctccaggttcggctgctcctggagcagcgcgtcggtctgggcattgagcctggcgagggcctggatgagctgcgtctgctgttggtcgatgggttgatgggccgctggcaccaccggcatggtcacgggttgcaaggggtcgacaggtgcgctgtcgggaggggaggggggtaatgaactgtgcatgtgtgaactcgtatgaagggcgcgtgcggcgcacggctgaatctgagttcggagtctagggttggcgctcaagggcgttgcggtgcatgtgtgtcggtgcggcggcgaccgggagcgatcaattgcctggtgcgcaggcgcgtgtaatccttgccggcttttctcctcaggtgtttattccatgcccatgactatccgcatcgccgctgccctcctgatcggcagcgacggccagaccctgctggtgcgcaagcgcggcacccaggcgttcatgcagcccggcggcaagatcgacgcgggcgagctacctgcgcaagccttggcccgtgagcttcacgaagaactgaacctgcgcattgagcccagtgtcgcgcagtacctcggccagttctcggcaccggcggtcaacgaaccaggctttaccgtgcaggccgagttgttccaggtacatatcgacgtgccggtgactcccgccgcggaaatcgaagaagtccgctggatcgatccgatgggagatggcggcctgcacctggcaccgctgacacgcgacgtgatcctgccgttttaccgagaattgaaaacccggtgatctgcgctcagcgcactgcactgaccccatccagggtcgagaacgaggtgtccttggccgtcagcaggaagtcgcgcatgtacggcgcatccagcatgtccgcgcggatgccggcgtacagggtcgcaaacagacccttttcgcccaggcgcttggccttcacgtaaccgcgcgaactgtactcgtgcaacgcccaatggggcatgccgcacacgccacggccgctggccaccagttgcatcatcatcaccgtcagttccgaggtgcgcacttgggcgggctccacatccgccggctccaggaagcgggtgaagatgtccaggcggtcgcgctccaccgggtaggtgatgagggtttcggtcagcaggtcctgcggcacgatgtaggccttgttcgccagcgggtgttggttggccaccgcgagcatggcttcataggtgaatagcggcacataggtgatgccgggcaactcaagcgggtcggaggtcaccaccaggtccaggtcgccacgggccagggccggcagtggggcgaaggcgaagcctgaggccaggtccagctcgacttccggccacgcgtcgcggaactggtcgatggtcggcatcaaccactggaagcaactgtggcactcgatcgccatgtgcaagcgcccggcggtgccaccggccaagcgcgcgatgtcgcgttcggcgccgcgcagcagcggcagggtggcgtcggccagttgcagcaggcgcaggccggcgctggtgaagcgcaacggtttggtcttgcgcacgaacagcggcatgcccaggcgttcttccagctctttgaactggtgggacagcgccgactgcgtcaggtgcaggcgttcggcggcttccaccaggctgtcggcttcgcgcagggcgtgcagggtcttgaggtggcggatctcgagcacgggttctccatgagcataatttgtgacgaatcggaatggcgtgagtttgtctcatgttgcaagccgtgtcgaccatgaccgttgagcactcttcatcaaactgtcacgcaactgtggcagcgcgcttgaacaaacttcatcagactcgcgctctactggggttctgcgtttcggtgtttttcatgcgcgtgttgtttttactggccgccttagtgttcggcctgccgtcttttgcggcttctcgatgtgatgtcaatgtcccgacccaaacggtcgacctggctcaggtgagcatcgcctaccagagcatcggccgtgcgtccgaccctgccttgctgctggtgatgggcttgggcgggcagttgatccactggcccgacgaggtggtcgtcgccctgtgccagcaaggtttccgggtgattcgttatgacaatcgagacgtcggcctatccacttggcgccaggccccggccaatgccaacctgaccttcgaggtgttgcgctacaagctcggcctgccggtgtcggcgccttacacgctgaccgacatggccgatgacgccatcggtttgatggacgcgttgcaggtccagcaattccacgtactcggcgcgagcatgggcgggatgatcgcccagcacctggccgccatggcgccgcagcgggtcgagagcctcacgctgatcatgaccagctccggcgccgaaggcctgcccgcaccgaatgccgcgctggtgcaactgttgtcgcgacgcagcgcgccgaatcgtgaagtggccctggagcagcaggccgacttgctcgccgcactgggcagcccgaacgtgaaggatgatcgccaggcgctgttgcaccaggcggcgctgtcctacgaccgcgccttcaaccccgagggggtgaagcgccagatcatggcgatcctcgccgaaccgagccgcgtgccgttgctcaaccaactgcgcgtgccgaccctggtggtgcatggcaccgccgacccgttgttgccggtgatgcacggcgtgcacctggcggcgcatatccagggcagtcagttgaagctgattcccggcatggcccatcggttccaggaagcgttcaaggcgccgctgctgacggcggtgttgccgtacctgcaagcccatcgcgaagatgcggcgcattgggcgcagattgacctgggcgagccttcgaaggtgttgtgacattggtgtatcgtgcaacctttacggcgcattactgccagcgaggttgcctgccatgagtactcccctgaaaatcgatttcgtcagcgatgtgtcctgcccctggtgcatcatcggcctgcgcggcctgaccgaagccctcgaccagcttggtgccgacgtgcaagccgagatccacttccaaccgttcgaactgaacccgaacatgcccgccgaagggcaaaacatcgtcgagcacatcaccgagaaatatggctccaccgccgaacaatcccaggccaaccgcgaacgcatccgcgacatgggcgccgggttgggctttgcgttccgcaccgacggccagagccgcatctacaataccttcgacgcgcaccgcctgttgcattgggccgggttggaaggcttgcagtacaacctcaaggaagcgctgttcaaggcgtacttctccgatgggcaggacccgtccgaccacgcgaccctggcgatcattgccgagagcgtcgggctggatatccagcgtgcggccgagattctggccagcgacgagtacgccgccgaagtccgcgaacaggaacaactgtggatctcccgtggcgtgacttcggtgccgaccatcgtgttcaacgaccagtacgccgtgagcggtgggcagccggcggaagcttttgtaggcgcgatccggcagatcatcagcgaatccaaaaaataacgccgaacgcaggtcaaaatgtgggagggggcaagccccctcccacattgctctccattggtcttgagacaggtgctggcccgtcccttgcattgcccctttaaagccttaagggacactgccttgaacattcttgacctcgaccacagcctcaccggccaggcaccgattgcccggcgcctggccagtggccgcgcccaccgtatcgacctgctggacctgggccccaagctgcgcctgtggtccaccgaaaaaacctggaagcgcttcgccgaacgcctggcccaacggcccaggcccatcgacgcacggccggaaattctgtttgtcggctccggcgattatcaccacctcacgccggcattcctggctgatttgaaagagcccatcagcctgatccacttcgacaaccaccccgactgggtgcgctttgcgcccaagcgtcactgtggttcgtgggtcaaccgcgcgctgaagatgccggcgatcaagcgcatcgtcaccctcggcccgtgcagcgacgacctgcacaacccgcaactgcgcggcggcaacctcggggcgctcaagcgcgggcaattgcagttgtttccctggcagcatgcgccctccaaagtctgggggcgggtaggggacggtgccggccaccagcagcaggaaaaccacctgcattggcgcaacctggccgagttggactgggtggcattcctggagcagatgatcggtagcctgcccaccgaggcgatctggatcaccatcgacaaagacgtactcgccagcgaagacgccgccaccaactgggaccagggcggcatgcgcctgactcacctgctgcaagccttgcgcgcgttggcggcgcgcaagcgcatcatcggcatcgacgtgtgcggcgagttcgccacgccggcgttcagcaatgccttcaagcgttgggaagccaagtccgaccagccgccgcccgagcgctggagtcctgaggatctgcagcgcaatgccgcgaccaatgaagccctgattgatctgtttgaggagctgttcccgtgaccttgaccgtggtgttgctggtggcgttttccatcgtgctcgatgtgattggccagctgtgtttcaagatcggcctggaccgtttgccggagttggacggtggttttcgcctgaatgcgttctggggccaggtgttcaatgcgccattgctgtgggcggggatcggcgcctatgccatcgagtttttcgtgtggctcgaagccctctcgcgcgcgccgttgagcctgctgtttccggcggccgcgctggcgtattgcggggtggtgctggcgggcaaggtggtgctgggcgaaaccgtcagccggcgccgttggctgggtacgctggtgattaccttgggtgtgatgttggtggcgattgcagggagtcaggcatgagtacgcaaacgatgaatagcggatggttgcatgggcgtttgggcacggtggtgctgtgggccttgctgatctgcacggaaagcgccggccagttgtttaccaaagtggctggcgaccagttggggcagatggatttcaactggcagtggctgggtgaggtggcgcgcaaccctgggatcctggcggcgattgccagctacatcggcgcgtttttcgtgtggatgctgatcctgcggcgcagcagcctgtccctggcgtttccgctgagttcactggtgttcgtggtggtgttgctgggttcgtggctggggctgggggaacatatcagcccgctgcactgggtgggggtggcggtgattattggtggtatcgccctcctggcagagggcgaagaaaactgagtgcctagggtttgcggtgtgccaccaaaaaccctagaccatgggacaccggaagtgttttgaccccggcctcccgctgctgcccggcaatctcccgatgaaacgccttcactttggtccagtgcatcttcggccggtagtgatgctcggcgtggtagccgttgttcatccagatcaggttgtacaacacactgtaggaactcacgccccaggcgatcggcaggtccgggttgccgccgaaatgctcgtagtagccattgagcgatgacaggcactggccaaggtaccagaacggcaacagccacagcaccgcctgccagttgtagaacgccagcgcgatgtagaacgccacggtcacgccgatctcgaccttgacccagcgcgcatcggccgggcgtttgcgcttcatctcgtcatagaagggcttggggtcgtcgcggaaaaaactcaggaaggtataggcccacgggttttccggctggccatcgtgaccacgctggtagatcgacagcgggtcgatggtcttgccatccggccccggcaggtcggcgttgccacggtggtggcggttgtggatgtcgcggtagagcgtctgggagaaaccgatggtcaccgacagcagcaggtcgaaggcccggttcatggcgcgatgggtgaagtaggcgttgtggatctggttgtgggagatgctgttgatgctccacgacaggctgaccgcgtagagcagcgccagcggcaccagggcccaccagctcaggtgatggaacgcggcaaccagccagacgacaaacgcgaaatgtgccaggcccagggcgatgggcaccaggtcccagagcgagtggtgcagcaggcggtaagcggggcgagccatgaaaagtgtcctgggaaaatggattccaggccttcattgcaaaccccagaccaacctaatcgaacgtgtagctgatcgctgtttgcacctggccctggttcacgtcgccggtctgccggacgatgctgctgtccgctgccgaacccaccagatgtacccagctcgcgctggtcaacaacgaccatttggcagccaggggaaactcgaagctctgcgtcagcgtcacgttctggaagccgccgctggcgttatagggacgaaaaccggtggcggcggcctcgttgtcatccacgccaaaaaacgtgttggtctggcgtgcatcggcaaaatgcgccaccagcccgctgctgccgatgatcccgccacccagcgggtagcccagttcgccgcccagtttgccgagggcgccactctgcgaatgcccaccgcccacggcttgccccaattgcgcgtagacccgccagaaatcagctggggcgtactggacgaagccacctacctcggccatgtccgacacattgcgcaggccctgcagatcgccattggacgtgcgccccgacaggtaattgatataggggccggcggtaaggccgttggtgttgagcgcactccaggtcaaaccgtcatcggtgctcaggctgacgctgccccagtccagatccaggtagggcacgggacggacttcgtagcggctggcggtggggtcatggggctggtaactgaggcctgcacccacttcaccggtgatgccttcggccagtgcagcgtttgaaaagctccacaggccaagcaaaccggcgaatgcagcgcatgtgatcctgtacatggtcacggttccttgattgattacgtgcgcatgaacgcgcgaagggccagcttcacgcaagcactcatcttgtttgtagcaagctacaaaaattgtagcttggaagacacattttgccttcgatacgcgccaaagccccggccctgctgggtgatggccagttggcacagtccctgctctacctctggtgcaagcgcacacagcgcgctcctccaaggtaaacaacgatgatccagtggcatatcgtgtgtgacttcgacgggaccattacccccaccgatgtcatcgacaacgtcctccaacgcttcgccggccccgaatgggaaaccatcgaacaggaatggctggatgggcatatcggttcacgcgaatgcctgagccgccaactggcgctgatcaaggccacaccttccgaattgctcgcgtacttcgacagcgtcgagatcgacccggacttccccgacttcgtcgaccacgtcatgggcctgggcgcgagcatcgaagtggtcagcgacggcatcgagcagggcatcgcccgcatcctgtcgcgcaactacgtgaccttgctgccgatccttgccaaccgcttgcgtcaggtcgaccagaacagctggcgcatcgacttcccgtattccagcgacgcctgccgcgccgcttccggcaactgcaagtgcaagtccaccccacgcaacaagcgggtgctggtgatcggcgacggcaagtccgacatgtgcgtggcctccaccgccgacttcgtgttcgccaagggcagcctcgccaagtactgcgaagccaacaacattcctcacgcacgcttcgacacctttgccgagctgcctgcattgctggcccgactgcctcagggcatcgccgccaacgccaccacctttactgctgctgacaaccaggaactcttccaccatgtctgatatccgtatcgctaccgccgaagaccagatccttctggacaaagaagccaagtattgctcctacggcgacaccgttcactacatcgagccgccgcgtattttcagccgttgcgaaggctcctacgtatgggacaccgaagaccaggcctacctcgacctgcaaatgtggtactcggcggtcaacttcggctacgccaacccgcgcctgaacaacgcgttgaaacagcagattgatacgctgccgcaaatcgccagccagtacctgcacaagggcaagatcgagctgtcggaaatgatcgcagtcgacgccaagaagaagttcggcctcgacggtcgcgtgcacttcaacgtcggcggttcgcagtccatcgaagactccctgaaagtggtgcgtaacgccaccaacggcaagagcctgatgttcgccttcgagggcggctaccacgggcgcaccctgggtgcttcgtcgatcacctccagctaccgctaccgtcgtcgctacggccacttcggcgagcgcgcgcagttcatcccgttcccgtaccacttccgtggccctaaaggcatgaccaaggaagaatacggcagccactgcgtgcagcaattcgcccgcctgttcgagactgaatacaacggcgtgtgggacccgaaagtcggctccagcgaatacgctgcgttctacgtcgagccgatccagggcaccggcggctacgtgatcccgccgatgaacttctatcgcgaattgaagcacgtgctggatcagcacggcatcctgatggtctccgacgagatccagatgggcttctaccgcaccggcaaactgtggtcgatcgaacacttcgacgtacagccggacgtgatcgtgttcggcaaggcgctgaccaacggcctcaaccccctgggcggcatctgggcccgtgaagagttgatcaacccgaagatcttcccgccaggttcgacccactccaccttcgcctccaacccattgggtacggcggtgggcctggaaatgttcaagatgaccaacgaagtcgactacggcgcgatggtcatggccaagggcaagttcttcctcgaaggcctgcaggacctgcagaagcgtttcccgatcatcggcgacgtcgacggcctgggcctggccctgcgctgcgaaatctgcggcccggatggtttcaccccggacaaggcgaccctggactacatggtcgaagaaggcatgaagggtgacatggtggtggacggccagaaactcggcctgatcctcgacgtgggcggttactacaagaacgtgatcaccctggcaccgtccctggagatcagctacccggaaatcgagctgggcctgaagctgctggagcaactgctggtgcgggcgaccaaccggtgaacagcgtcgggatcgacctcggtgaaggtgatgccggtttcgttctcggtgacggtccggtcgggatcctgttgatccacggcctgaccggcaccccgacggagttgcgccaggtcgccaagggcctggccaaggtgggcaattgcacggtgtacgtgcccaccctggccgggcactgcggtgacaacagcgacctgcaggccacgggctggatggactggtacgaaggcgtgcgcaagaccttcgtgcaggtccgccagcgtcacgagcaggtgtttgtcggtggcttgtcgatgggcgcggtgatgtcgatgtatgtcgccgccgaacacccggggcaagtcgccgggctgctgatgtattccaccaccttgaagtacgacggctggagcatcaacaagctggcgttcctcacgccgttgctgatgaaaatcccgttcggcgtgcacatctgccgcttcgaagagaagccgccgtacggcatcaagaacgaacgcctgcgcggcattgtcgagcggcagatgaaggaaggcgaaagcagcgaagcgggcttgctgaccatggagggcatcaccgtgcgcgagctgcaccggatgaacgccgtggtcaagaaacgcatgccgaagatcaacgtaccggcgctggtgttgcactccatcgaggacgacatcaccagccgctggaacgcggactatgtggaacgccacctgggcgggccggtgaccaagatcctgctggacaactgctaccacatgatcaccgtcgacctgcaataccgccgggtgatcgagttgagtgcggagttcgtcgagcagcatgcccaggccatcccggcccctcaagattatcgacagcgggcataagccttaaggacacgatgtgatcaccgcccaagccttcccgaccatccgggctatccagcgcagtgcctggaacgattgtttcccgggtgccctggaggactgggactattacgtcgccgtggagaacgccgccattgatgattttcagtggcgttacctggcggtttatcaagatggaacgctggtggccgtagctgccgcgttcatcacgcattatcgcctcgacaccacggtgtcgggcgccggcaagcgcctgaccgagcgtgtcgagcggctgtggccggggcttttgcaactggggctgtatgccctcggatcgcccgtggccgaacgctgcgacgtgggtttcgccagcagcgtgccggatgcgcagcgtccgctgttgctcaagcacttgctggaggctgcacgccaggatgccgatgactttggcatcggcctggtggcggtcaaggatgcgccgagcaaagacccgcactggctccagagctgccgcgcggcgggcttccagagcatgccgagcttgcccactggcgtgttgccgctgccgtacggctcggtggatgcctacctggggtcgctgggcaaatccacgcgcaaggacctgcgtcgcaagctgcgtgcgccggggccgcgggtggagtggcggcgcaatatcgacgatgtgttaccggaggtcatgcgcctgtacgaagccacgctcacgcgcgccgagttgcagttcgaacggctgcccgccggttacttcaccggcgtactcgaacgcctggatgagcgcgcggtctgtgttctttactgggtggacgagcaactggtggcgttcaacctgatcctggtcgacgaacaccggctggtggacaagtttttcgggcatgacgtggcgttcacccgcgactacaacctgtactttcgcagctggctgaccaatgtcgactactgtattcaacacaatattgcgttgtatgagtgcgggcaggccgggtatgccagtaagctgcgcctgggctgcgagttccagggcaacagtgtgtttttccgccaccgcaaccggctggtcaatggcctgctcaagcttgtaaaactgtttattcgaccggaccgttccgaccctgccatggctgctgcgataagcgaaacctgatgatcaccaagacccgccagaaagcccgcccctttgccatttcgcgctggagcgtccagcgcaagctggtgctggcgttctggttggtcagcgtgatccctaccatgatcgcggccgagctggccgcgaccacgctgtcgcagatcttcgacagcaacgtgcgcatctggctgcaggagtcgaccaagatcgtcaaggacgagatcggcgacatccttcacgacaacgcgcgcatggccaagctgttcctgcgctacaccagcccgccgtcaagccggcgagccgccaagcacgacaggctgaccgccgacattgccgacgcgaccgacatcgacgtggtggcgctgattcgcaccagcgaccacaaagtcgaattcagcaccgccgccgatgacatcgtcaaacagatcaacctgaccaacaatgcggtgttgcagaccgtgcaggtggccggggtgagtaccggcctggtggtgtcgaccttcgagaccagccgtgacggtgtcgactacattctgctggtcgccacctacctggacagcagtttcctcaccagcgtggccgatgtgcattccctcgacctgcgcctgtacctggccaaccccgacggtttctccgagatcttctcgacccagcgttttgtggatcatccctcgcgcatccccaagagcgtcgaaacggcgatgcgcagtacccgccagcccagcgagcagttcaccaataactacagcgggctgtactggccgatcttcaatgatgcgggggatttgcagggcgtgattttcagcggcctgttgcgccataccagcctggtcgggttggtcaaccagagtaatttgttcgtgttgatcttcctgctcagttctgcattgtcactggcggcgggggtgctggtgtcgcggcgcctgaccaaaccgttgcgcgacctgtcccaaggcgtagacgcagtgatctcgggtaactacgaacaccgtgtgctggtcagcggcggcgatgagctggcgcagttgagcagcaccttcaaccacatgaccgaacgcctgggcgagctgcatcaccttgaggcccagttgcgccgacgcgatcgcctgcacgccctgggcgaagtcgccatgggcctggcccatgagatccgcaacccgctgggcatcatcaagacggccacgcaactgttgcatcggcgtgccgacctggcggaaaccgacaagcgccatttggagtacgtggtcagtgaggtcagccgcatcaacgacctgatcaccgagttcctcgacttcgccaagcccaacccgccgttgcgcgtgctgcaaccggcgcgcgcgctggtggacgagatcctcggcttttgcgcgccggaactcgccacccacgcgatcgatgcccatgtcgatgaccaggcgccaggagcgacgatctatgccgacgccaagcagctcaagcaggcttgcctcaacctgattctcaacgccatcgacgccatgcccgaaggcgggcgcctgaccctgggcattcgcacggtggacaacaatacggtgatcagcatcgccgacaccggccagggtatcccggcggacatgatcgaacggatcttcaccccgttcgttaccaccaaggcctcgggcaccggcctgggcctggccaaagtctattcgatcatggaaagtcacgacggcagcatcgaatgcgccagtgagaaagatgccggcgccaccttcagcctgtacattccggcgattggcgaagacgacgaggacagtcatgacgcataacattctggtagtcgacgacgaacccaagctctgcgacctgctggcgtcggccctgggccagaacggcgtgcaggtgttcatcgccggcaacggcctgcacgcgctcaaggtgctggagcaggaagacatcgacctggtgatcagcgactggcgcatgccgggcatggacgggccggcgctgctggccgagatcaaggtgcgctacccccacgtaccggtgatcgtgatgaccgcctacagcactgtgaaaaacgccgtgcagtcgatgcgcaacggcgcctacgactacatcgccaagccgttcgacatcgacgagctggacatcaccgtggccaaggccctgcagtttcgcgacatcatgcgcgacaacgcgcgcctgcgtgccgaactggacgagcacgcacagttcgacagcctggtgggcgacagcccggcgtttcgcaaagtgctgcaagcggtggactcggtgcgcgacagcagcgccaccatcctgctcaccggcgaaagcggcaccggcaaggaaatggtggcccgcgccatccacaaacacggcagccgtgccgaccaaccgttcgtggcggtcaactgtgcagcgatcccggaagggctgctggaaagcgaaatgttcggccatcgcaaaggcgcgtttaccggtgccgtggctgaccgagtagggcgcttccagcaggctgacaagggcacgttgtttctcgacgaagtgggtgacatgccgttggcgttgcaggcgaagatcctgcgcgcattgcaggaacgcgtgatcgagccggtgggcgacccgcgcgagcgcaaggtggacgtgcgggtgattgccgccaccaacaagaatctgctggatgcggtggccaacaaagagtttcgcgaagacctgtattaccgcctcaacgtgttcccgatcccgttgccggccttgcgtgagcgggtggaagacatcgcgccgctggcccgccactttgcccagaccctgagcgccaccgccggcaaacgtatcaccggcttcagcccagaggccttgcaggccatggcggcgtatcactggccgggtaatatccgtgaactgcagaactgcgtggaacgcgcgaccatcgtagcggcctcaccggtaatcgaggatatcgacctgcccggttacctgtttgcgtccaagccgagcgggggcggtgtgaccgccatcctcagcgacgggccgggcattccccaggacctggatgcggcgctggcggaggtggagaaggcctatatcctggcggcgttgcaggagagcaatggggtgcaggcggcggcagcggcgaagatcgggatttccgagcgcagcttctggtatcgcctgaagaagctgggtattcaggtcgacaagatcgtccgctgacacaccgaggttcaaatgtgggagggggcttgcccccgattgcagtgggtcagacagcttttctgtctctgatacaccgccatcgggggcaagccccctcccacagttttgaccgtgttgggtcaggtgtgaacgcggacccagatgctgaccagtatcgtcgcggccatcaaccacgccaccgccgccacggccagtgacgcctccaaccgcatccgatccaccatcacatacaaggtcgccaggtacacgaagtacggaatgatcgaccacatcccgaacaggatcgtggtcttcaaatcgtccaccgagcgccccttgccgacgatgtagtgcgcgatcaacgcaaaggtcggaaacagcggcaccaggcctgcgatgtaatagtttttggtcttggccagcgccgccaggatcagcaccaccgccgcgccgagggcggccttcaacagtaagtccatcagtggctcaacccgtatttcttgaccttgtcgaacagcgtggtcttggccattcccagttcctggctggcctgggtcaggttgccgccgctgcgttgcagtgcatcgttgagcaggttgcgttcgaaggcttccaccgcttcggtgaaggccaggccttggccgccgctgctggcgccgcttttcttgaaggcgggcaggccgagggcgaaacgttcggcgacgttgcgcagttcacgcacgttgcccggccagtcgtggctcatcaggctggacagggtctggttgtccagctccggcgcggtgcggtcgaagcgcagggatgactgctgcaggaagtgttcgaacagttgcaggatgtcttcgcgtcgctcgcgcaggggcggcagttccagggtcaccacgttgaggcggtagtacaggtcgctgcggaattggttggcgcggctcagttcgtcgaggtcggacttggtggcggcgatcacccggcaatccaccgcgacgctctggttcgaccccaggcgttccagggtgcgttcctgcaatacccgcaacaacttgatctgcaggttgatcggcatgctttccacttcatcgaggaacagcgtgccttcgtgggcgtgctcgatcttgccgatgcggcgcttgccggcaccggtgaaggcgttggcttcgtggccgaaaatctcgctttcgaagaggttctccggcaggccgccgcagttcagggcgacgaactggtgggcgtgacgccggctgaaatcatgcaggcaacgcgcgaccaattccttgccggtgccggtctcgccttcgatcagcacgttggccgaggtatcagcgacgttggcgatcaactcgcgcaggttctgcatggccggcgaacggccgatgatgcgaccttccaacgaatcgcgctcggccaattgccgacgcagcgaccagacttcccgtgccagcccgcgctgctccagggcgcggcgcgccacgtcgaccaggcgttcgggggagaagggtttttccatgaagtcataggcgccgttgcgcatcgcgccgaccgccatggaaatatcgccgtgcccggtgatcagcaccactggcaggcttttatccagggccttgagacgggtgagcagctccaggccgtcgatgccaggcaaacgaatatcgctgatcacgatgccggcgaagttttcgccgatgcgcttcaacgcctcttcggcactgcctacgccgacgctgggaatatcttccagggccagggcttgctggcagccgagcagcacgtgagggtcgtcctcgacgatcaacacggtgaggtcttctttaagggctgtagcgtctgtattcatgtcgactcagcttgttgagtgcccgccagcggcaggcacaagacaaaggccgttccaccactggccgggtgttccacggcgagggtgccaccggtggctgccgccaggctggcggacagcgtcaggcccaggcccaggccttgctcgccgggcttggtggtgaagaacggttcgaacaaatgcttgcgcgcctcggggtcgatgccgtggccattgtcgcgcacttgcaggcggtatttgccctcgctgctgctgccttccagccacaactgcggggccggttgggcttgcatggcgtcaagggcattgccgatcaggttgaccaggatctgttccaggcgtgtctggtcgatttgcagttgggcgtgggaaaagtcgcggtgcagcgtcagcggcagactgtccaggcgtgcgccgagcacctggaacgcggcgtctaccgctttggccaggctggcttcgccctgatcgtctccgcgtcgggcgaaggagcgtaggctggcggtgatgcggcccatgcggtcgatcagttcattgatggtcttgagattggcgctggcggtgtccagcgcaccgcgctccaggaagcgcacggtattgccggacaaggtgcgcagcgcggccaggggctgattcaattcgtgggcgatgctggtggacatctggccgatggccgccagtttgccggcctgcaccagttcatcctgggcacggcgcagggtttcttcggcctggcgccgttcgcggatctggcccttgagccgttcgttgctggcgcgcaggtcggcggtgcgctcggcaatccgtcgttccaactggctgttggcttcctgcaaggcttcccgtgccgcgaggcgggtggcgatgactttgcgtcgctcgttccaggcaatcagcaaaaacgccaccaggccaaacgcaacggccaccaggatgccctggttgatcgcggcgcggcgcaggtcgttgagcggggtgagcagggtgaaattccacggcgtgtcattgagcgggcgggtttgcgccaggtagctgacttcgtgggcgtcgttgaccacttcgctgttggccgggaaggtcagtttttcggtgccttcgttgaggtgctcgcgggccaggggttccaactcgttcagtgtcgcccagtaatattgcaggctgtgggccaggcggtccttggtgtcatcgctcagcgggcgcacggccttgaggcggcgggccgggtcgctggagaggatgatgataccgttctcatcgctcacgaacgcttcgaggcgtgcgcgctgccagcgctcttcgagggcttcgaggcgcaccttgaccaccgcgacgccgatgatcttgccatgctcttccaggccgtgggccaggtagtagccgggttcgccgttggtgctgccgatgccgtagaaacgacccggctggccccgcacggcgttctggaaataggcgcggaaggacaggtcttcaccctggtaactgtcggcatcgcgccagttactggtggccagcacgcggccggtggtgtccatcacgtagatggcccgactacgactgcgtcggttcaggccttcgaggtaatcgttgacggtcttgcgggtttcctggttcgggtcggccagcagcgtggaaacgctggactccagctccagcaggctgggcaggtaggtgtacttgctcagttcgctttcgacggtgcgggcatgcaactccaactggcgttcgccggtgtcgctgagggtgcggataccgtagtactcactgacccagaagccgatgaaacccaggccgatcatcagggcgatgatcaggggcggcaggaacagttggcggatcaggcgtggtttcacggcaagtgatggcggtgcggcgcgaaattggttggggtcgcatttcatcacagatgccttgggtcaaccagagctgccagcctgtgcgggccaatgtgggaggcggcaagccccctgccacattggcccggtttccacagtcggcgctatgtagtgcttagtgctgcaggattttctcaaggaagtgctgcgcgcgttcggagcgggcgctgatgtcgccgaagaactcttctttcgggcagtcttcgatgatcttgccggcgtccatgaagatcacgcggtcggccactttgcgggcgaagcccatttcgtgggtcacgcacatcatggtcatgccttcgtgggccagttgcaccatcacgtcgagcacttcgttgaccatttccgggtccagcgccgaggtcggttcgtcgaacagcatgacgatcgggtccatggccagggcgcgggcaatcgccacacgttgttgctggccgccggagagctggccagggtgcttgtgcgcatgggccgacaggcctacgcgctcgagcagttgcaggcctttcttggtggcttcttccttgctgcggccgagtaccttgatctgcgcgatggtcaggttttcggtgatggtcaggtgcgggaacagctcgaagtgctggaacaccatgccgacgcgcgagcgcagttgcggcaggttggtcttagggtcggcgatggaggtgccgtcgaccacgatgtcgcccttctggaacggttccagcgcgttgacgcacttgatcagggtggacttgcccgagccggacggcccgcacaccacgatcacttcgccttttttaacctcggtgctgcaatcggtcagcacctggaagtcgccataccacttgttgatgttcttgatagagatcatacggcaaaccttttttgcagacgcttgaccagcagcgaggcggaaaagctgatgatgaagtagacgacaccggcgaagatcaggaactcattggagcggccgatgatgtcgccgttggagcgggcggagttgaggaagtccaccaggcccacggtgtagaccagcgaggtgtcctggaacaggatgatcgactgttgcagcagcaacggggtcatcttgcggaacgcctggggcaggatgatcaggcgcatggtctggccgtaggtcatgcccatggcctgtgccgccgccatctggcccttggggatcgactgcacgccggcccgcacgatttcacagaagtacgcggcttcgaacatcatgaaggccacgacgcaggaggtgaacgcaccgatcggggtgtcttcgccggtgatccagcgcaatacgaacggcaccgccaggtagaaccaggtgatcaccagcagcagcgggatcgagcggaagtagttcacataagcgccggcaacgcgcgacagcagtttgctggacgacaggcgcatcagcgccaggaccgtacccagcgcgataccgccgaccacgcccatgaccatcaactgcagggtcatgaccatgccgttccacaggcccgggatggcggggatgatgccgctgaaatcgaagtccattatttaccccccacggagatcaggccgggcactgcgactttcttctcgaccacgcgcatcagcaacatcaggctcatgttcagggtgaagtagatcagcgtagccagggtgaaggcttcaaacaggttggccgagaactcggcggtctgtttggtttgcgccagcagttccatcaggccgatcaaggacgccacggaggagttcttgaagacgttgaggaattccgaggtaagcggcggaatgatgatccggtaggcctggggcagcagcacgttccagtagatctgcggcagcttgaagcccatggcgcgtgcagcggattcctggccacgtggcagcgcctggatgccggtacgcacttgttcgcacacacgagcagcggtgaacaggcccaggcacacgacaacgctcaggtaggccgaggtggtcgggttgaggtcctgtttgtaccagtcctgcaggttctgcggcagcatgtcgggtaccaggaagtaccagatgaacagctgaaccagcagcggcacgttacgaaacagttccacgtagcaggtcgcgatgcccgatacgatgcggtttggcacggtgcgcatgacgcccagaatggaccccagcagcaaggcgataatccatgccacgacagcgatggcgatggtccagcccaagccggcgatgtaccagtcgagataagtctcgctgcccacgccagtggacttgaagaacacgccccagtcccagttgtaattcattagggtctcccctcgaaatcgatcgatgtacaagcacccgcttggggaagatcctttcccgcccggcggtgaacgccaggcacacgcgatcggctcgaaaaccgccaggtcgagtgttccacaataaagccagcaggtagtaacagacgcctgagggaggttggctccctcaggagataagcttagtcaggtatcagatttttacgtcaggggctggtttgtcgcttgggttagcgatcagctccttcaccttgtcgctcatcgggaagttcaggttcaggccttttggtgggatcgggctctcgaaccatttgctgtagatcttgttgatttcgccggatttgtacagggcaacgatggcgtcatcgacagctttcttgaagtcaggatcgcctttgcgaaccatgcacgcgtaggcctcgaaggactgtggagtaccggtgatgacccagtcgtccggcttcttggccttggcttcttcaccggccagcagggcgtcgtccatcatgaatgcgacggcacggccgctttccagcatctggaaggattcgccgtggtctttggcggagatgacgttcatgcccatctgcttgtcggcgttcatcgccttgatgatgcgctcggacgtggtgccagcggtggtcacgacgttcttgcctttcaggtcggcgaagtcagcgtaggacggcttgccatccttgtctttcttgaccagcaggcgggtgccgatttcgaagatgttgacggtgaaatcaacttgctgggcgcgttcggcgttgttggtggtggagccgcactcgaggtccgcggtgccgttctggatcagcggaatacgagtttgcgaagtcaccaggttgtacttggccttcaggtcgggcttgttcaggtcttttttcagggcttcaacgatagccagctgaatgtcgtgggagtagcccacaggtttgcccgaaccatccgcgatgtaggaaaacggaatggagctgtcgcggtgagcgagggtgatggtgccggagtcgttgattttcttcagtgtgccggtgagttcggcggcgaaaactggagtgctgatcagagcagcagcgatagctgcgcccaggatatggggaacgatgcgcatcaatacttcctcgacatttgttttttttatgaagccggctaaacggctctcttgtacagcgaatgcccgtgacggctcctgaggcgtctcaggcaatcgtcagggagtgtagagcatgagtcgtgccatacctcgaataaaaggttatctatttgatttataaaggtattaaatttttatttcgaagaatttgtcacgccgtgatccggcaatccgaataggctgcggtatggcgttcggaaaaccgaatagggggtgtgggatttatctggcataaaaaagcccctggacctttcggtgcaggggcttttcaaggcgacctgatcaggccgcttcaatctttgcgcgggtttgctcgaccttggacaggtaacgttgcacgttgtcctgttcttccggggtggtgaacaagccgagcttggtacggcgccacagcacgtcgtggggttgggtcgcccactcttcggcgcacaggtaatcgacttcgcgggtgtacaggcctccacccaggtggtcacccagatcggccagcgactgcacaccttcgagcagtcgccaggtgcggctgccgtaagtggtggaccaacggcgggcgatctcgctcggtatccagtcgaacttgctgcgaatcgcttcggccagggcttctggcgtcgtcatgttttcaccgcccggcaggctggctgtggcggtccagcttgggcgcatctgggtgaagtacggtgccagttgcgccatcgccgactcagcgagtttgcgataggtggtcagcttgccgccgaacaccgacaggatcggcgcttcgcccgtgccaccggacagtgccagggtgtagtcgcgggtgatagccgacgggttgtccgactcgtcgttgcacagcgggcgcacgccggaataggtatgcacgatgtcatcgcgactcagttgtttcttgaagtgcgcgttgaccactttcagcatgtagtcggtttcaccttcggtgatcgcgacttttgccgggtcgccggtgtattcgcggtcggtggtgccgatgatggtcaggtggttcaggtacggaatcgtgaagacgatgcgctggtcttcgttctgcaggatgtgcgcgtgggcaccttcgtacagtttcggcacgatcaggtggctgccctggatcaagcggatgccgtagggtgaatccagcttcaggtcgtccttgatgaacttggcgacccacgggccggcagcgttcaccaaggcgcgggcgcggatcgagaacaggctgccgtcggcgcgttccatgttcatgtcccacatgccgttgctgcggtgtgcgctgatgcaacgggtctgggtatggatgtgcgcacctttttcgcgggcggccatggcgttgagcaccacgaggcgggcgtcatcgacccagcagtcggagtattcgaagccttgggtgatttcactttttagtgggctgtcggcgccgaacttgaggcttttcgaaccggcgagcttttcgcgcttacccaggtggtcgtacaggaacagaccggcacggatcatccacgccggacgcaggtgtgggcggtgcggcagcacgaagcgcatctgcttgacgatgtgcggggccttggccagcagcacctcacgttcggccagggcttcgcgcaccaggcggaattcgtaatgttcgaggtagcgcaggccgccgtggatcagcttgctgctggcggaggaggtgtggctggccaggtcgtccttttcgcaaaggaataccgacaaaccgcgcccggctgcgtctgctgcaatgccgacgccattaatcccgccaccgataacggcaacgtcatagacttcggcaagcggtggagcaggcaaggtagaagggttcatcggctggcctcgcgatctttttcgtattggaattcgaacattaatgttcatttgcgaaaatggtagctgataaacgcgcgcgcagccacctgacttcgattgaaaaaactcatcgaagcggcgggaaaggaaaatttgtgaacatgagccagtgctggctggagaaatgggtggtcaggtaaatagcgatcgggggcgagccccctcccacaggttgatcgcattccaatgtgggagggggcttgcccccgatggcgtcagtgcaggcgctacaccacttccagacgaaccttgtggtcattgagcaactgcaccaacgccggcaccggctgttgatccgtcaccaggcaatccaccaggctgatcggccccagacgaatcatggcattgcgcccaaacttgctggagtccgccgccaggatcacctggcgggcgttggcaatgatcgcctgggaaacccgtacttcctggtaatcaaagtccagcaggctgccgtcttcatcgataccgctgatgcccaccagagcaaagtcgaccttgaactggttgatgaagtcgacactagcctggcccaccacacctccgtcacgccgcacattgccacccgtgagcaacacatcaaagtcgtccttggcactgagcatggtggcgacgttgaggttgttggtgataattttcagatggttgtggttgagcaacgcgcgggcgatggattcggtggtggtgccgatattgataaacaacgaggcgtgatcggggatctgcgcggcgatggcttcgccgatgcgctgtttctcgtcgcgcatctggtcggcacgcatggcgtatgcggtgttttcgacactggagtcataggccgcgccgccgtggtagcggcgcagcagattggcgtccgccagctggttgatatcgcggcggatagtttgcggggtaacaacgaagagctgcgccatttcctcgatactgacgtagccgcgttcgcggaccagttcgaggatttgttgttggcggggaggcagattcatggggcgtcctttgggctgccatacaaaagtggcccatgatgacgcaggaatccgctccctgccagttacaaccctatatgggtccggcgcttggcttattcagcgccttcgtgcggctcccagtcacgggtgcggctgaccgctttttgccagccagcgtagagtttttccttggcggcttcgtccagttgcggttcgaattcgcgctcgatcaccgccttgccgcgcagctcgtccaggctgccccagaagccgcacgccaagccggccaggtaggccgcgcccaacgcagtggtttcgcgcatttgtgggcgctcgacctgggtaccgaggatatcggcctggaattgcatcaggaagttgttggccaccgcgccgccgtctacgcgcaacgccttgaggcgctcgcccgaatcctgctgcatggcgtcgagcacgtcgcgggtctggtaggcaatcgactccagggcggcacgaatgatgtgatccacgcgtacgccacgggtcaggccgaacagtgcgccacgggcatacgggtcccagtacggcgcgcccaggccggtaaacgcgggcaccaggtacacgccgttgctgtccttgaccttgccggcgaagtattcggtgtcgtgggcgtcgttgatgattttcagctcatctcgcagccactgtacggtggagccgccattgaacacggcgccttccagggcgtaagccacttcgccacgcgggccgcaggcgatggtggtgagcatgccgtgcttggatttcaccgctttgtcgccggtgttcatcagcaggaagcagccagtgccgtaggtgttcttggcctggccggcttcgacgcacatctggccgaacagggcggcctgctggtcgccggcgataccgccgatggcgatgccgcttttggtacggccgtagatttccgaggaggacttcacttgcggcagcatttcgcgcgggacgtcgaggatctccagcatcttcgcatcccactccagggtgtggatgttgaagagcatggtgcgcgaggcgttggtgtagtcggtgacgtgggtcttgccgccggtaaatttccagatcagccagctgtcgatggtgccgaacagcagttcgccgttgcgcgcacgctcgcggctgccttcgacgttgtcgaggatccacttgagcttggtgccggagaagtacgggtcggtgaccaggccagtggtgtcattgatgtattgctcgtggccatcgcgcttgagctgctggcagatctcggtgctgcggcggcactgccagacgatcgcgttgtagatcgggcgaccggtgactttgtcccacaccacggtggtttcacgctggttggtgatgccgatggcagcgacctggtcatggtgcaggccggcctgtgccagcgcttcgaccatcaccgcactctgggtggcgaagatttccatcgggtcatgctcgacccaaccggcttgtgggtaatgctgagtgaattcgcgctgggcggtgcagaccacgttggcgtcacgatcgaagatgatcgcgcgggaactggtggtgccttggtctagggcaatgatgtagttcttattctgaatatcggtcatgtcgaatgccttggaaaataagaaagtcggtaatcagcctggggcgcaagaagggcaggtgcgtccaggccggcgctatcaggaaatacgggtcttgccgttgactgccgtgtcagatgtttcttcagctgtagcaggtgcggcgctcggcaggtggcgggcaatcagcccgcgataggccgcggcgccgaggcatgcgccgacaatcggcgcgaaaatcggtacgaggaagtaaggaatatcgcggccgccagtgaaagccatttcaccccaaccggcgaaaaaggtcatcagcttgggcccgaaatcccgtgctgggttcatcgcaaagccggtcaaagggcccattgcgctgccgatcaccgcgatcagcaggccgatcagcaggggggccaacgggccgcgtggcaggccgttgttgtcatcggtgagggccatgatcacacccatcaggatggcggtaatgaccatttccaccaggaacgcctgggcggtgctcagcagcgcatgggggtaggtggagaacaccgacgccagttccaggctggcctgggagccgcgcaccatgtggtgggtttgttcgtaatcgaaaaacaggttgctgtagagcgtgtacaccaaggccgccgagcagaaggcgccggcgatctgggcgagaatgtagaagggcagtttgcgcttgtcgaagtcggcgaaaatgcacagcgcgatgctgacggccgggttgaggtgggctccggaaatgccggcgctcaggtagatcgccatgctgacgccaaccccccagatgatactgatctcccacaagccaaagctggcacccgcgaccttgagcgcagcgacacatccagtaccgaagaagatcagaagcgcagtccccaggaattcggccatgcattggctcgaaagtgaaggctgttgaagagcagttgtcatggaaaacctcagttgttgttcttgtctggcgcacaacctcaacgggttgttgcgcgattttcaccgtgccagggatccccatcccggacgcggcttactgcttgaacgctgcgggactattcctacagtattcggaaacgaaaaaatatagacaagaatgacggctgtcaaaggtcgaaagtgaaccgtcagtcactttcaaactattggtctggtgaatgatcacgcttgtcacattgcgtgtgtacggcaagagtgggcggactagagcgttttacgtgggcttggcctagaattggccatctgtttgccacgcctcggagacaccatgacgcccgcattggacttgttgaaaaaagttcgcgccgaacatcgcatccacagttacgaacatgaccccaaggcggcttcgtatgggctggaggccgcggaaaaattgggcctggaccctgcgcaggtgttcaagaccttgctggccagcagcgagaaaggcgaattgttagtggcggtggtgccggtcgtcggaagtctggatctgaaagccctggcgcatgcggcaggcgtcaagaaagtcgaaatggccgaccctgcggcggcgcaacgttccaccggttacctgttaggcggcatcagcccgttggggcagaagaagcgtttgcgcacgttcattgatgtgacagcgcagccgtttgcgacgatttttgtgagtgcggggaggaggggcttggaggttgaattgccagcggcggtgctggctgagcatacccaggccaagttcgcggaaattggccgggcatgacgaggttttataccgggctgtagcgtcgtacgccggattcgactggagggatgtgtgcggccgtgctgccggacgcctggaacaacaccaggtgttcggcggccacccgaatgcccacatctgcaccgacctgatgatcggcatgactcgggaaaatcgactccagctgcgcgccggtcggcagctgcaggcggtacagcgtcgatgcaccgaggaaggtcttgccgacgatccgcgctttcaacccgctgtccggcgcgtagacgatgtcatccggacgcagcaacacatccaccgcaccgccggtaggccaggtgtaggcgcggttgccgcgcaactcacccagttcggtgctgaccgattccggcgaactcaattgcccacgaatgaagtagccctggccgataaagctggcgacgtagggcgtctgcggctcgtgataaaggttgtagggcgtgtcccattgctcaaggcggccttctttgaacacgccgacctggtcgctgacggcgaaggcttcttcctggtcatgggtcaccaggattgcgctggtgccgcgggccttgaggatgtcacgcacctcgtggctgagcttgcgtcgcaactcgccatccaggttggagaagggctcatccagcaacagcaaggccggttctggcgccaaggcacgggcgagggcgacgcgttgttgctggccgccggacagctcatgggggaagcgcttgcccaggtttttcaggtttaccagctccagcaactcggcgactacgcggtctttttgcgggtgcttgcgaatgccgaaggcgatgttatcggccacgctcaggtgaggaaacaacgcgtagtcctggaacaccatgccgatgcgacgtttctcaggggccaaggtgaacccggcactggagatcacttcgccagccaggctgatttcaccttcgtgcaccggctcgaacccggcaatcgctcgtagggtggtggtcttgccgcagcccgaggaacccagcaggcaaccgatgtcgcccgcattgaggtgcaggttgaggttctgtaccacccgttgatcttgatagccgcatgccaggttgcgcaggttcagcagtaatggatggctcatgcgtggtggtacgacggtgggacgaggaattcgagcaaggccttttgtgcatgcaggcggttttcagcctggtcccaggcgaccgagcgtgggtcatcgagcaggtcggtgctgatctcttcgccacggtgggccggcaggcagtgcatgaacaacacatcaggcgcggccaggtcgagcagggcgcgggtcacctgatacggggcgaacaaggccaggcgcttggcggtttcgtcttcctggcccatggaggtccagacgtcggtgcttaccaggtgcgcaccgatcaccgcgtcatgcgggtcgcgtaccagggtcacgcggtcgccggcctgctccaggaagcgcgcgtcaggctcgtagccttccgggcatgcaacgcgcaattggaagtcgaattggatggccgcttctatatagctgttgcacatgttgttgccgtcgccgatccaggccacggtcttgccctggatcgagccacggtgctcaaggaaggtttgcatatcggccagcaactggcacgggtgcaggtcatcggacaggccgttgatcaccggtacacgggagttggcggaaaattcggtcacggtgctatgggcaaaggtacggatcatcacggcatcgagcatgctcgacatcactttcgcgctgtcggcgatcggctcgccacgacccagctgggtgtcgcgcgaggacaggaagattgcctggccacccagttggatcatgccggcttcgaacgatacacgggtgcgggtcgacgacttctcgaagatcatgccgagcacgcggtttttcaaaggctcgaacagtacgccgcggttacgcaggtctttaagctcaatgcctcgacggatcacgctgaccagctcttcgggcgtgcaatccatcagggagagaaagtgccttgcgctcatcattaactacctttttgcaacagaccgcagatactcaaagccttgtttattgtgacaacgggcgagacctgcggcgaaagccgcacggggcgacgaaataggggaaggcgcgatcttataattaaatgtcgcgtcttaccaatagggctacggtttttaagggtgttcaagcagggcgccgaagcgcttttgaagatgaattccagacagcagcgggccatttgtacactggcgtcgagaccttttgcaatgtgcggaggcgggcgcaggccaggctgcgtcggtttcagaggctgtacgccgggttttgaaacatttgctcacgcttgcccatggcctggcctgatgctggtcgattcacaggacgaacgttggtggcgcccctgccgctcccggcccatagtgggatcaaagcccctataaaagagactggccatgaccaagactctccaccaccgtgcctgccatctgtgtgaagccatttgtggcctgaccctggaaaccacccaggccgacgacggcagcctggcgatcacctcgatcaagggtgacgcccaggacagtttcagccgtgggcatatctgccccaaggccgtggcgctgcaggatatccagaatgacccggaccgcctgcaccagccgatgttgcgggtgggcagtgaatggcagccgatcgcgtgggacgaggcgtttacccttgtcgccgaacggctggcgggtattcaggcgcggcacgggcagaatgcggtggcggtgtaccagggcaatcccagcgtgcacaactacgggctgatgacccacagtaattacttcctgggccagttgaagacgcgtaatcggttctctgcaacctcggtggaccagttgccgcatcacctcaccagttacctcatgtacggccatggcctgctgttgccaatcccggatattgatcacaccgacttcatgctgatcctgggcggcaacccactggcgtccaacggcagcatcatgaccgtgccggatgtggagaagcgcctcaaggcgatccaggcgcggggtggcaaagtggtggtggtcgacccacggcgcagcgagacggcggcgatggccgaccagcacctgttcgtgcgcccgggcggtgacgcggcgttgctgttcggggtgctcaacaccttgtttaccgagcacctgacccgcgacagccatttgccggttgaaggtcttgaggatgtgcgtcgcgccatcgccgggtttagtgccgaggccatgagccgtcagtgtgcggtgcctgccgaacagatacgccaactggcgcgggactttgccgccgctgataaagcggtgtgttatggacgcatgggggtctcgacccaggcgttcggcaccctgtgccattggctggtgcaactgatcaacctggtgaccggcaacctggaccgcgtgggtggtgcgctgtgcaccacaccggcggtggacctggtggcatcgaccggtggcgggcatttcaatcgttggcagagccgggtttccgggcgcccggagtatggcggcgagcttccggtgtcagcattggccgaagaaatgctcaccgaaggtgaaggacaaatccgcgccttggtgacggtggcgggcaacccggtgttgtcgacacccaacggccggcagttggaacaagccctcgacggcttggagttcatggtcagcatcgacctctatatcaacgaaaccacgcgctatgccgacctgatcctgccgtccacttcggcgctggagaatgatcactacgacaccaccttcaacatgtttgcggtgcgcaatgtcacccgcttcaatcgcgcaattctgcccaagcctgcgggcgcactgcatgactgggaaatctttgtcggcttggccaaagcgtttgccgcgcaaacaggcacggtgctcaagccgaccctgccgcccgcgcagatgatcgacttcggcctgcgtgccggagtgtacggtgatgcgtccagccacaagttgtcggtggccatgctggcggaccatccccatggtgtggacctgggggcgctgcagcccaatctcgccgcgcgcttgaaaaccgttaatggcatggtacaagcagcgccagcggtgattcttgccgatctggcacgttttgccgcgcagccggtggcggtggccgacgaactgctgttgatcggccgccgccacgtgcgcagcaataattcctggatgcataattaccatcggctggtgaagggcaagccgcggcatcaattgctcatgcaccccgatgacctggccagtcggcagttgaacgacggtcagcgcgtgcgtgtgagttctcgcattggcatgatcgaagtggaggtcgtggccagcctggacatgatgcccggtgtcgtcagcttgccgcatggttggggccatggccgccccggcgtgcagatgacgattgccagcggacagccgggggcgagtgccaatgacttgaccgacgagcggcagttggatgagctgtcgggcaatgccgcactcaatggcgttccggtgcaggtagcagccgcctgagcaccgcgctggaaatttgcgttacaatgcgccaccgtgccgacctgtgagtcgcaaagttccagccgaggtgttccatggatatcatcgaaacgatcaaagagcagattgccaacaacaccattctgctttacatgaagggcgcgccaaacgctcctcagtgcggtttctccgcgaaggcttcccaggccatcatggcgtgcggcgagaagttcgcttacgtggatatcctgcaaaaccctgaaatccgcgccaacctgccgaagtacgccaactggccgaccttcccacaactgtgggtggccggagagctggtcggcggcagtgacatcatcgttgagatggcggctgatggttcgttgcaaacgctgatcaaagaagcagcggcaaatgcggcagccaagaccgacgcgtgattcgcctgcaataaaaagccccgcctctcgagagagagcggggcttttttgttcctgcgagctgcgggcttattcttcgcccatctgcgattgcaggtagttttccaggctgaccttgtcgatcaggcccagttgggtttccagccagtcgatgtgctcttcctgatcttccaggatgtcttccagcagttcacggctgccgaagtcgctcttgatttcgcagtgagcaatagcggccttgaggtcgctgtggctcttgcgctcaaagcccaggtcactgccaagcatctccttggtgtcctcgccgatgttcagcttgcccaggtcctgcacgttcggcaggccttccaggaacaggatgcgcttgatcagcgcgtccgcgtccttcatggccttgatcgattctttgtattcacgcttgcccagcttttccaggccccaatcgtcatacatgcgcgcatgcagaaagtactgattgatcgcgaccagttcattggcaaggattttgttgagttgctggatgactgagatgtcgcctttcatgactggggtcctgccctgtaatagctgtgtataaggcggagtttgagcggcagaacccttagtgtcaaacctaagttattgaataataaatgaaaattaatcggaataagaatgtttgtgttccgcgtcttagcgctaacttattgaattgcgggcataaaaaaaccggacactaagtccggttctttaaaacatgccaatcaggcgtgtgtaaattctgctgaataggggagcgcggcctgagcggtctgcagctgtgtcagggtttcccgtaccacttgcttggccaggcaagcacatttgccacactggctggcaacgccggtagcttcacgcacttccttgtagctgcagcaaccttcatagattgcttcgcggatttttccgtcggtgacgccagtacacaggcacacatacataagggagaaccgtcgcgggtttaaggcttaagtgcggtggatcttaatgttaacgagaatgattgtcaaagtagaatcgtagggtattcgctggcaccgtgcccgcactgacgaacggttttttcagtgtatgatggtcggtcttcacgaagcgtgactgcgtcacggggctgtcgcttatcaacggcagactcagggccggtccttttacttcaatcgtcaccctcacatcaggagataaccaatgagcgtactcgtcggcaaacaagccccggatttcgacgtacctgccgtcctcggcaatggcgaaatcgtagacagcttcaaactgtctgaagccatcaaaggcaaatacggcctggtgttcttctacccgctggacttcaccttcgtctgcccttcggagctgatcgctctggaccaccgcatggacgatttcaaggcgcgtaatgttgaagtggtagccgtttccatcgactcccatttcactcacaacgcctggcgcaacaccgccatcaatgatggcggcatcggcaaagtcaaatacaccatggctgccgacatgaagcacgacattgccaaggcctacgacgttgagtccgaaggcggcgtggccttccgtggcgcgttcctgatcgacgacaaaggcgtggttcgctcccagatcatcaacgacctgccactgggtcgtaacatggaagagctgatccgtctggtcgacgccctgcaattccacgaagagcacggcgaagtctgcccggccaactggaaaaaaggcgacaaaggcatgaacgcttcgccagaaggtgttgcggcttacctgaccgagaacgctggcaagctgtaagccacgtttgcggcaaaaaaaaaccggcctgagaaggccggtttaatgagatggtcacccccaacaccctgtgagggctacgctttcacagggtgttttgttttcggaggccatcatcatgagcgagtcagcactgatcgggatcgatctcggcaaacata

SEQ ID NO: 101 - DNA, 270935 bp, Pseudomonas nodulensis
  misc_feature (88511)..(88562): n is a, c, g, or t
  misc_feature (230679)..(230714): n is a, c, g, or t
cgactctcatcgtggcgctggggcaagccccaaacagacgccggatagatttaagcaagccaaccacaccacccgttaatcagtattgcaaaaatgggggtgaccatagatttttatgcgcgggattccacttcagtcgttgaagtcttcccagccgcccatctgcttccagcggttgacgatgccgcagaacagctcagccgtcttctccgtgtcgtaacgggccgagtgagcctcacgaccgtcaaagtcgataccggccgcctgacaggctttcgccaacacagtctggccatacgccagcccggcgagggttgcggtgtcaaagctggagaacgggtgaaacgggttgcgcttcatgtccaaccgcgccacggcggcattcaggaagcccaggtcaaagctgctgttgtggccgaccaggatcgcgcgtttgcagccattggccttcaatgccttgcgcacgccacggaagatatcggtcagtgccgcttcttcacttactgccatacgcaatgggtgatcgagcttgatcccggtgaactccaaggcagccgcttcgatattggcgccttcgaacggctcgacgcggaagaagtgggtgtgttccgggaacacaaaaccctgttcgtccatgccgatagtcgtcgcggcgatttccagcagcgcatcggtggcgcagttgaaaccaccggtttctacgtcgatgacaaccggcagatagccgcggaaccgctcggccatcggatgacgggatccgccaccgctgtgctcgtgttcgtcatcgtaatggtcttcactcacttgctttcctccagcaggcgccagcgcagtgtttcaccggcgcgcagcgggatgacagtcagctcgccaaacggcaggcttgcaggggcggtccagtcttcacgaaccagggtaatgcgatcggtattcgcgggcaggccgtagaaacgcgggccattgaggctggcgaacccttcgagcttgtccagggcgttgcgctgttcgaacgcttcagcgtacagctcgatggcggcataggcggtgtagcagccggcacaaccgcacgcggcttctttggcgtgctgggcgtgaggcgcggagtcggtgccgaggaaaaacttcggattgccgctggtcgccgcatccagcaaggctacctggtgggtgttgcgcttgaggatcggcaagcaatagaagtgcggccgaatcccgcccaccagcatgtggttgcggttgtacagcaggtgatgcgcggtgatggtcgcagcaacgttggccgaggcttcggtgacgaactgcacggcatcggcagtggtgatgtgctcgaacacgaccttgagggtcgggaacagctccaccacgcgacgcatgtgttcgtcgatgaagatcttctcgcgatcgaacacgtccacatcgccacgagtgacttcaccgtggatcagcagcggcatgccgacgtcggccatggcttcgatggccggcaggatcttatcgatactggtcacgccggaatcggagttggtggtggcgccggccgggtacagtttggcggcgtgcacaaacccactggccttggcctcgcgaatttcttcgggctgggtgcggtcggtaaggtacagcaccatcagcggttcgaaccggctgccggccggccgtgcagcgaggatacgctggcggtaggcatcggcttgctcggcgttacgcaccggaggaaccaggttaggcatgatgatggcgcggccaaaggtacgcgctacatcggccacggtgtggggtaacgcagcaccatcgcgaagatgaatatgccagtcgtcgggacgcagcagggtcaggcggtcggacattggggattccaggcgggtcaatctggggggaatgctaccggaaaagactctatcaggcactcgctatcaagttttgcaggatgcaaccgatagccttttgtatgccttatcgatgtatgacgctttgaagtgttgtagaaaccagtggagcctcccgtgcgccagcattacctagccctgctcagtgtgttcgccagcctgcccgcgatggccctcacgttccagacacgtctggagaacattgagtggaaggtagagggcgaccagttcgagtgccgtctgacccagccgatcacagacttcggttcgggtgagttcgtgcgccgggcgggtgagcaggcaatatttcgtctgaaagcctataacggttcgctgggcacaggctcggccaccttgttggctgccgccgccccttggcagccaggccgaggcgatatcaacctcggcgccgtgcgtgccggtagtggcgatgtgttgttcaatagctcgcaggcccaggccggtcgcctgttcaccggactgctggaagggcgcagcccgacggtccgccactacggccgtgaaggcggctactccgaaatccgcttgttgccggtgaaattcaataaggcttataacgactaccagctgtgcaccgccaagctgttgccgatgaattacgatcaggtcaaacagaccgaagtcggattccctggtggcggtatcgagttggacgcagccgccaagaagaaactcgacgtgattcttgcattcatgaaagccgacccgacggtcaaccatatcgagttgaatggccattcggacaacagcggcaaccgcctgaccaatcgcgacgtctctcgccgccgcggcttggcggtgatggactacttcaaggccaacggtatccaggaatcgcagatcaccctgcgcttccatggcgaaagctacccccttgcgcccaacaccaatgcggccaaccgggcacgcaatcgtcgtgtgaatatccagcttgaacgcgtggcagcccccgagaagccggcgccccaagccactggcgcaagcaaccctgcacacacgtcctaaggtgcgaccatcggtcgcccgttcgacataatctgtcgctttatcttcatttgctgtcgcgcccctgtaaattcacggttttggtcggtagaatcgacgcctttccgtacaaccccgtggagtgatggcatggccgacgtaaacaaggtcgttctcgcgtattccggcggcctggacacttcggtgatcctcaagtggctgcaggatacttataactgtgaagtggtgaccttcaccgctgacctgggtcagggcgaagaggtcgaacctgcacgtgccaaggcgcaagccatgggcgtgaaagagatctacattgacgacctgcgcgaagagttcgtccgcgatttcgtcttcccgatgtttcgcgccaacaccgtctatgaaggcgagtacctgctgggtacctccatcgcacgtccgctgatcgccaagcgcctgatcgaaatcgccaacgaaaccggcgccgacgccatttcccatggtgctaccggcaagggcaacgaccaggtgcgattcgaactgggtgcctatgcactcaagccaggcgtgaaagtgattgccccttggcgtgaatgggacctgctgtcccgtgaaaagctgatggattacgctgaaaagcacgcaatcccgatcgagcgtcacggcaagaagaagtccccgtactcgatggatgccaacctgctgcacatctcctatgaaggcggcgtgctggaagacacctggaccgagcacgaagaagatatgtggaaatggaccgtctccccggagaacgctccagacaagccgcaatacttggaactgacctaccgcaacggcgacattgtcgcgctggacggcgtcgaaatgaccccggccactgtgctggcaaccttgaaccgtatcggtggcgaacacggtatcggccgtctcgacatcgtcgagaaccgctacgtgggcatgaagtcccgtggttgctacgaaacccctggcggcaccatcatgctgcgcgcccaccgggccatcgagtccatcaccctggaccgcgaagtggctcacctcaaagacgagttgatgcccaagtacgccagcctgatctacaccggctactggtggagccctgagcgtctgatgctgcaacagatgatcgatgcttcccaggtacacgtgaacggcgttgtgcgcctgaagctgtacaagggcaacgtgatcgttactggtcgcaagtccgatgagtcgctgtttgacgccaacattgctaccttcgaagaagatggcggcgcctacaaccaggcggacgcagcaggctttatcaagttgaacgcactgcgcatgcgcattgcggccaacaaaggtcgctcgttgttctaagtctcagccggttttaagaatggccccttattcaggggccattttttttgcctatggattttgtgtggagatgcaatgtttataaaaggttaaacatttgttgatgtttttcagtagacgcattttcaaatgcgccttcgatggtgctgttgttgaaagtttgtagggcgaatgatttttttacacctgcttaggaactggtcttacagaagattcactcatgaaagtgaggtgggcgtataaaacacggaacactctgtaggaattaaggatgtaagagaatatgttaaatggaactaaaacagtcggacacttcttgcccggattcctgcgcgtaggacagaggcaaggggcatttcctgagagttgtgtgcggcacgtttacccaacccctgatactccatggatatttcactcaaaatatgtaagtccccggaaaggtctgaaaggatctataaaactggatacatctgagttggcgtttttttgtagggcaattcctttatcgctgtggggtgggtctctgcttgctgttgctcgggggggaacgctatgccaaccaggaaacgactaggctattgtgcttgctctaaataattcgaacagcgaaattggactttctcatgaataaagtgctgatcgtggatgatcatcccgtcattcgtcttgctgtgcgtatgctaatggagcgtcatggttatgaggtcgttgccgagaccgataacggtgtcgatgcattgcaacttgcacgggagcatatgccggacattgtcatactggatattgggattcccaaacttgacggcctggaagttatttgccggctgtcttctaccaagcaatccgtgcccttcaaggtgctggtgctgacgtcccaggcccctggccatttttccatgcgttgcatgcaagcgggggctgccggctacgtgtgcaagcaacaggacctgaccgagttgctgagtgcgatcaaggcggtgctgtcgggctacagctacttccccaaccaggcgctcaactcggtacgctccaccatgggcaatgccagcgaggccgatatggtcgagcgtctgtcgggtcgggaaatgatggtattgcagcagttggcccggggccggaccaacaaggagattgccgacggtatgttcctcagcaacaagaccgtcagcacctacaagacacgtttgctgctcaagctcaacgcccgctcccttgtggacctgatcgaactggcccagcgtaacggcttggtatagaggagggcaccgcagcgcgcattatctgggtaaccggcagaaaaaagcctccgtaagggaggcttccggccgtcgatcgttcgatcacagatcgaagtcgtaatcggccagctgtttttgcaagcgtcgttcttccagaagattgtcgatggtgcggcgtttgctcaaattggtcttggctacctcaacgacgggtgcctctgccacatcatcatccgattcaacgaggtcgtcttccacttccagttgttctttgccagtgctcataaggttcactccgggctaagactgccgttggcgctccttataacgataatccatgatcgggtaaaaaagattttttcaatcgcctgatcaagaaaaccaatgatccctcaatcgtcggatgtcttgtccttgtattcgcacaggtcttcgatacgacagctgccgcagcgcggcctgcgggcctggcaaacgtagcgcccatgaaggatcagccagtggtgagaatccagcagatagggcttgggtacaaacttcatcaactgcttttcgacctcaactacgttctttccacgggcaatgccggttctgttgctgacccggaagatatgggtgtccaccgccatcgtcagttgccggaacgcggtgttgagcaccacattggcagttttacgacccacccctggcagggcttccaaggcttcacgggtttgtggcacttcactaccatgcagttccaccagcaggcggcaggtctcgataacgtttttggctttgctgttatagaggccgatggtcttgatgtactcagacagtccttccacacccagggcatagatcgcctctggtgtgttcgccacgggatacagcttggccgtggccttattgacgccgacgtcggtggattgggccgacaggatcaccgcaatcagcaactcgaacggcgaggtgtaggccagttcggtcttgggttccggattgtcttcgtgaagcctgcgaaatatttccaggcgttttgcggcgttcatcgggtagcgggttccttgcagacggtcagcgggattgtatcaacacacaccgcaggtttgcgggtcaggtgttgctgagggcatccatatggcgctgcgcatcgtccagcttcagttgcgcctcggccagttgctgcggttcgacgttcaggtcctgggctttcttcagttccgctcgacgcatcgccagctggattttggcccgtttcagatcagcagtgttgctgaatgacgtcgctgctttcggtacgatccccacctccaaggcagccagcgcttgttccgccgcttcgaactgctgttgcaggatgatcaactgcgactgctgttcaaaggtcggtggatgaccaaacgccttcaaggatttgtgcagttgggcgcggctcatcgcgacagcgattttggcttttttggtcgccgcatcctcggcaacatcggcctgcacctgcaaaaccgacgtggaacgcttggcccgagcctggcgttcggcgagtctatctgcttcttcgcgttgcaggcgtgcattgcgctgctcaaagcgtcgccgcgccctgtcgcgtttcagaccgcgttcatggtgttgacggtcattgatcaccagtccgcccaccatgggcagcacacgggtcgctgggcgcatctcaatgcaatcgacagggcagggcgcaacgcacaggtcgcagccggtgcactcatccatgatgacggtgtgcataagcttggcggcgccgacaattgcgtccactgggcatgcctggatgcacttggtgcagccgatgcactcggcctcgcggatgtaggcaacctgggcgggcgcttccccgcgactggtgtccagatccagcaccggtacctgcagcaacagcgcaaggccggcgatggtttcctctccgccgggcgggcacttgttgatcgcctcgccacgcgcgatacccgcggcgtaaggcttgcaacccgggtgcccgcacttgccgcattgggtctgcggcaggagtgcgtcgatgcgttgaatgaggttcatgctgtgatcatgggcatagcaaaccgggtttaataggaggctggggctctcttgtggtgagcggggcaagcccgctcaccacaacaagctccttcaccacagcaagcccgctcactacaaggtggcttacttgatacgttgacccggcttggcaccactgtcagggctgagcaggtagatctcttcgccaccagggccggccgccatcaccatgccttcagacacgccgaacttcattttccgaggcttgaggttggcgatcatcatggtcaggcggccatcgagtttggatgggtccgggtaagcgctcttgatcccggagaacacgttgcgttgctcaccgccgaggtccagtgtcaggcgcagcaacttgtcggcaccctccacggcttcggccttgacgatcagcgcgacacgcaggtccaccgcagcaaacgcgtcgaagtcgatttctgcggaaatcggatccttggccagttcgccattaccagccggcgtcgattcgccagtgtcggtctggctggcgaccaggtcttctttcgaagcgtcggtcatggcctggactttcaccgggtcgatacgggtcatcagcggcttgaactcgttcaactgatgattgctgagcaggctggcgtgatcattccaggtcagcggcgccacgttgaggaacgcctcggcgtcggcggccagcagtggcagcacgggtttgaggaagatcaccaactggcggaacaggttgacgcccgttgcgcagatcgcctggacttctgcctgcttgccttcctgtttgttcagcgaccatggtgccttgtcggcgatccaggcgttggcgcggtcggcaaggcccatgatctcgcgcatggcacgggcgaagtcgcgggcttcataggcgtcggcaatgctcggcgcggcggccaggaaggcggcggtcagttccggcgcagcgttctcggctaccagtacgccggcattgcccttgtggataaacccggcgcaacggctggcgatgttgacgactttaccgaccaggtccgagttgaccttctgtacgaagtcttccaggttcaggtccaggtcatcgacgccacggcccagcttggacgcgtagtagtagcgcaggtattccggtgacaggtggtccaggtaggtgcgcgccttgataaaggtgccacgggacttggacattttctggccgttgaccgtcaggtagccgtgcacggcaatgccggttggcttgcggtagcccgaaccttcgagcatcgccggccagaacagggcgtggaagttgacgatgtccttgccgatgaagtggtacagctctgcgctggagtccttgctccagaacgcgtcgaagtccagctccggcgtgcggtcgcagaggttcttgaagctggccatgtaaccgatcggcgcatccagccatacatagaagtatttgcccggctcgcccgggatctcgaagccgaagtacggcgcatcgcgggagatgtcccattgctgcaggccgctgtcgagccactcggagagtttgttggccacggcatcctgcagggtgccgctgcgggtccaggtttgcagcatctgctggaaatccggaagcttgaagaagaagtgctgggaatccttgagcaccggggtggcgccggagattgccgacttcggatccttcaggtcagtgggtgcataggttgcgccgcacttttcgcagttgtcgccgtactggtcttcggtgccgcatttcgggcaggtgcccttgatgaaacggtcggccaggaacattttcttttccgggtcgaaatactgggtcaccgaacgctggtcgatgtgcccggcttccttgagccgcaggtagatctggctcgacagttcgcggttttcttcggagtgggtcgagtggaaattgtcgaaatccaccaggaactcggcaaagtcggcgctgtgttcagcctgcacattggcgatcagttgttccggggtgatgccttccttttcggcgcgcagcatgatggccgaaccgtgggcgtcgtccgcgcagacataaatgcattggttgccgcgatgcttctggaagcgcacccacatatcggtctggatgtactcaagcatatggccaagatggatggaaccattggcatagggcagggcgctggtgacgaggatcttgcgtggctcggacatggggctcggctacttgatgaaacggaggtcggccactataaagcgccgggaaatatatttcaccccgtgccgctgtttcagaatcttcccatcctgcgaaagcatgccgtaaggccgctggaacggttaggatagccacctgtttcattcagtctttttcgggagtagcccatgagcgccgtcaatcgcgcagcggtggaagccgtgcttcgccagtacaccgacccttatttgaaccaggacccggtcagtgccggctgtgtacgcgccatcgacgtccagggcgaccaggtgtcggtccaattggagctgggttatgcagccggtctgttcaagagcggttgggcacagatgctgcaaatggccattgaaggtctcgacggcgtgcggtcggccaaggtcgacatccgatgcgtgatcgccgcgcacaaggcccaggcacagatccctggcctggccaacgtcaagaacgtagtggctgtggcgtccggcaagggcggcgtgggtaaatccaccacggcggccaacctggccctggccctggctcgcgaaggcgcgcgcgtggggattcttgatgcggatatctatgggccgagccagggcgtgatgttcggcatcgccgaaggcacacggccgaaggtcaaggaccagaagtggttcgtgccgatcgagtccctgggcgtggaagtgatgtccatggccttcctcaccgatgacaacacgcccatggtctggcgcggcccgatggtctcaggcgctttgctgcaactggtcacccagaccgcctggggcgacctggactacctggtgatcgatatgccgccaggcaccggtgacatccagctgaccctggcgcagaaagtcccggtggccggctcggtgattgtcactacgcctcaggacctggccttgctcgacgccaagaaaggtgtggaaatgttccgcaaggtcaacatcccggtgctgggtgtggtggagaacatggcggttcacatctgctccaactgtggccatgccgagcatctgttcggcgaaggcggcggcgagaagctggccactcagtacggcgtggaactgttggcctccttgccgctgtcgatgctcatccgcgagcaggcggatggtggcaagcctaccgttgtggctgaaccggacagccagatcgccatgatctatcaggagctggcgcgtcatgtcggtgcgcggatcgtcctgcaggaagccgccacgcctgccatgccgaccatcaccgtcagcgacgactgaggcgtttgaagggaaaaagcctcgacgttgtcggggctttttcatgcctggaagacggtcaaggtgcgtttgtttcgcaattgcacagctggtcgtgtaagcatttgcttactttttcgtaagtgtttggggttttttccttccatggacgtccgttttcttcgagagttttttctaaccaattgaaatttaacaattaattattccgtgttcagggcgattgcatgtcagttcatgggttggatcccgttgaacttcctttggaactctttaagatcagccctgtgtccacggattggcacagccttcaaggaacgatggttgaaggaacgtcgcaggatgcgattcatcaggatgatgaaaaggaatacagggactagggaaaaaatgtgggcgggtcataccgccccttttttttgcctgcaggaaagtgaaaccggtcgtccagaaacgcaaaaaggcccgcaaggggccttttggaggggggcgacgctatcagcgttcgaggtctgcaatcttaccttttttgccatcccactccgctgcgtccggcatcgggtctttgcgttcagtgatgtttggccagatttccgccagctcgacgttcaactgaatgaattcctgcatctccgccgggacttcatcctcggagaaaatagcgacggccgggcattcaggttcacacagggcgcaatcgatgcactcatccgggtggataaccaggaagttcgggccttcgtagaagcagtccaccggacacacttcgacgcagtcggtgtacttgcacttgatgcagttgtcggtaacgacgaaggtcatttctaatattctcctcaggcggcggcagcgaaaccctttgtggcagggctcgcgaggttcgggagcgatagtctgcaggccaggctaaaagcctccagcatcccaaaccgcgcgagagtctaccagcttgcaagcgtctgcgttatatccgaacttgcagtgcatataacatttcgagcgcttttcgcggcgtcaagccatccaagtcaagcttagccaattcatccagcaccggatggggcaggctggcaaacatgtcgctctggtgcggcgcagccggtttgctggcggctttggctgggctggcgaccaccgtctcatgcggcagggccgtggtttccaggcggcggaggtgctcgcgagcgcgggtgatcacatcgttcggaacccccgccagttgcgccacggccaggccgtagctctggctggcgggccctggcagcacgtggtgcaggaacacgatacgctcgttgtgctcggtggcgttcaggtgcacgttggctaccagcggctcgctttccggcaacaccgtcagctcgaaatagtgcgtggcaaacagcgtgtaggcacgcaggtgcgccaggcgttcggctgccgcccaggccagggacaagccgtcgaaggtgctggtgccgcgacctacttcgtccatcagcaccaggctgcgttcggtggcattgtgcaggatgttggcggtctcgctcatctccaccataaaggtcgagcgcccaccggccaggtcatcgctggagccgatccgggtgaaaatgcggtccaccagggacagttcgcaactggccgccggcacaaagctgccgatatgcgccagcagcacgatcaaagcggtctgccgcatgtaggtggatttaccgcccatgttcggaccggtgatgaccaacatgcgggtatcgtcgtccagcgacaggtcgttggcaacgaacggcgtggtcagcacctgttctacaaccgggtgacgaccttgcacgatgcgcatgcatggctcgctgacaaaacgcgggcagttcaggtcaaggttcagcgcacgttcggccaggttactcagcacatccagttcggccagcgcggcggcagtgtcttgcagcggcgccaattggctgatcaagtcttccagcaagttctcatagagcatcttctctcgagccagggcgcggctcttggccgacagcgccttgtcttcgaattctttgagctccggggtgatgaaccgttcggcacctttgagggtctggcgacgttgatagtcgatcggcgccgattcggcctgcttgctgggcaactcaataaagtagccatgcacacggttgtagccgactttcaggttggccaggccggtgcgggctttttcgcgggcttccaggtcgatcaggaactgcccggcgttttcgctcagggactgcagttcatccagttcgctatcgtaaccggtcttgagtacgccgccgtcacggatgatcgccggcgggttgtcgatgatcgctttttccagcaaggccgccagttccgggtaggtcccggctgtgacggcgagttgttgcaggtgcggcgtatccagctcggtcatcgccacttgcagttgcggcagggcgccaagggcatcgcgcaggcgtgccaggtcgcggggccgtgcgttacgcaggccgatccgcgccaggatacgctcgatatcgccgatttccttcagctgtggctgcagcttttcaaagcgatagccgtccagcaggcaggtaatggaagtctggcgcgcttgcaatactgtcaggtcccgcagcggacggttcaaccagcgggtcagcaggcggctgcccatagccgtctggcaacgatcgaccaccgattgcagggtgttatcgcgaccaccggccaggttggtatccagctccaggttgcgacggctggcgccatcgagcaccacggtatcgtccagacgctcatgacgcaggctgcgcaagtgcggcagggcggtgcgctgggtttccttggcgtagccaagcaggcaaccggcggcgccgatggccagggtcagggtttcgcacccgaagcctttaaggtcctgcaccgagaactgctggcacagacttttcagcgccgaatcacgctcgaaatcccacggcgcacggcgcttggccccacgacgtttttctgccggcagatccttcggccaatcatccgggatcaacagctccaccggattgatgcgctccagctctgccagcaggttctcccagcccttgatctccagcacgctgaagttgccgctggtgatatccagcaccgacaggccaaacagacgctcatcgcccaacaccgcagcaatcaggttatcgcgacgctcatccagcagcgcctcatcactcaccgtccccggcgtaataatacgcaccacctggcgttctaccggccccttgctggttgccgggtcgccgatctgctcacagatcaccaccgactcgcccagcttcaccagcttgacgaggtaaccttccaacgaatggtaaggaatcccacacatcggaatcgactgccccgccgactgcccgcgcgcggtcagggtgatgtccagcagcttggcggccttcttcgcgtcttcgtagaagatctcgtagaagtcgcccatgcggtagaacatcaactgatcagggtgctggttcttgaggcgccagtactgctgcatcattggggtgtgggaggacaggtctgaagtggttttactcattgggtcgtaggcaaattcgttgaaaggagtggggcaaatgtggggcattccgccctgcgattttgcaatgggcgcaaggttaacacgcaaggtcggcgcttcgcaggtcgcaaacggataggtaaaacgcaaaagggggcggcgcatttactcaactgcaaataagcgcgccgcctgtatctgccatgcctttgtattacagcgcccgcacggggatgcagatgtcacagatgaactcaccggtgtcagaatcggttgcggtcgccgcaaaaaacgtctcgaaacatggccggtcatcgcattgcagaccgctggagggcatccattcacgcgtcagccacatccaggcatcggctattttgtctgttttccctttgaagctcgctacggcatagcggccgcccggcagggtctggatatctgcttgggcgctggtcacaaaagaggctggcacttcaacgcaggcgtcatagcggcacttagttggaggcgtgatcgaaggatcgtcataccctatgccgtaacaccgttcaccgccgaggccgttggagtgcatccacggcgccatggtcccgcgccagaagtagccgattgcggggccgtaggggccgatcaggcgttggtaggcaacgcgtaccttgggtaaatcaataatgcgtacgtccatggtgggctctttcactgaaggagaagagaacccagcgtcgtcgaacgtacgctcatgtgcctgatgggcattgccgaagacctgatcgggattgctctcctgcggacccggccgcggcccgatggcagccgcctgcgctgccagccgctgtggtgtgttggcgcgccactcggatggcgtgcagccaaactggagtttgaaggcccgtgcgaatgcttcgcccgaattgaaaccgctggccaatgccgtttcaagcacgctttcatggctgccgcaggacaggcggaacgctgccttctccagtcgccgccgccggacgtagctgcccaaggtctcgcccatccacgccgcgaaaatccgatgaaaatggaagcgcgaaaagttggcgatatcggccaaccgggcaccctccaagggggtgtccaggtgggcatcgatgtagttgagtacgcggttcatacgccgggcgtactcggcgcgggatgcgtgggcgcagattttggtggtcatagtgcgtggtagtatgcacaaaaaatgcaaattagcatttgccaagccaaaaaactcccgtcactatccccgttatgcaaaaacgcaacgtttctatcgtattaagagaactgctggaccgcgaccggatctcccccacggagcttcaccggcgtactggcgtgcctcaatccacactctctcggatcctcagcggcaagatcgttgatccgtcggacaagcacatttcccgtatcgccgagtacttccgcgtcagcaccgattacctgcgcgggcgcgcggccatgggcgctttgcgcgatgacgtgcgtgacccgatgcattcggaactcaaggacataagcctgtgggacgacgacacgcccgttaatgatgacgaggtgtcgatcccttttctgcgcgaggttgaattggctgctggatcaggaagattcgtcatcgaggaaagcgagaaggccagcctgcggttcggcaagcgcagcctgcggcataacggtgtgcagttcgaccaggccaagtgcgtgaccgtgcgcggcaacagcatgttgccggtgctgcgcgacggtgcgacggtcggggtgaacgcgggcaaaagcggcattggcgatatcgtcgatggtgacttgtatgccatcaatcacaacggccaattgcgcgtgaaacagctctatcgcctgccttccgggattcgcctgcgcagtttcaaccgcgacgagcacccggatgaggactatagcttccaggatatccaggatgagcagatcagcatcctgggccatgtgttctggtggggcatgtacgcccgttaaccttcttgcgtaagacaaagcccgccaacgagcgggctttttttcgtctgcagaaaatcgccaaaccctcggcccacgaggctaaaaatgcatgtgtgcatttatgcggtaaaaataaatgcatttatgcattgactgtatatgcatacatacttattcttcattcaagccagccaaacaaggcttggtggaggcggcaaggatgctgccaggaaagacaaggaaggcacgcaacaccggcaaggacgccatctgagcgatggcagggaggccaggcaacaccggcaaggatgccgacgctctttagttttaccgcttcaagaacaggcagcgatgaaccggcctcataacggttcagagggttggcaactgacccgggtgtgcagcgtaaagcaccagaagcagttatccggcagacagggatcgtggtcggaaaaacatcgaggaaagatccgtaccgcgccagtagcgccgaaagatcgaatatggaccgcattactgaaaagcccgggcaaccgggctttttggaatgcctacctacaaaatggatttacccaagagccggccccgcgccggtagtgctcagccaggaggcgtgacatgacaaacgagcagcaagcgttagcggaaatgcctatctggctggtgatcgtactggccctgatcggcggggtctccggagaaatgtggcgcgccgacaaggagggcgcccgcggttggtcgctggtacggcgcctggcgttgcggtccggggcgtgcatggtctgcggggtctcggccttgatgctgtgttacgccgccggcatgtcgatctggaccgccggcgccattggttgcctcaccgccatggccggcgcggacgtggccatcggcctttatgaacgctgggcagccaagcgcatcggggtcaaccaggccccgacctctcgcccggatcagcagtaaccgctgcaaggatgcaagcagatgacacctctcgaaaaaccttcccaactgcccgtggcgattggggatgcgctgaagagtgcgttcccacagcttcgggttggtaatcatcatgacttttctggagcgggcgataaaacgggcattttgatcagcgtggatcgcaacggccctggcattcgctcgcttgcaggacgcaaggcgcacgccttgtcggtttcactcaaggtcatggtcgccggcggctcggcaccgtttgatgcctgcgacctggccagccaactgatggacctggccctggataaccgctggggcctgccgcccgaacaatgcgacctgcccactgcgattgtcgcggcaccttccgtgctcaacggtgcggaaacggattacgacacttggtttgtatcctttacccagaacttctacctcggacggtctctgctcaaaaatcccgcaggcatgccgccttctacggacctgtatgtaggtgggtgtgagagggcggcgaatgtaacgccgcttcctactcaatcacacggaaaaggtggttcagtaaaaggaatttgcagatgttgaaagaattcagatgcggtaactgcaaccgacttctcgcccgtacgggtgggtttacagagctccagatcaagtgtccccgatgcggcacgttgaatcatgtgaaggccatgagcctcgagcaatcgcctttgagcgacatgaatgcggaatcttccgcgaacaatcagtcgactcaataggtgaagatatggaaccagtacaaatcggcagccgtttcaaatcgatcgcaacaagctacgcagaggcagttttcactccggcgcagaacgtcaatggcgcggtagttcgaacagctacgatgatcagccccgtcgggaatggatttattagtacaggcacgaccattccggaagggcgctgggtgacaaacgtgcccgttatcttgtccgccgttggcggttcttccactctcccgttctctgtgaccatccctgccggtcagggcctgtgggtagcaatgactcagaatggcggcggtactgcttatgtgacctacgacctgctgccgtaagtagtagtttctcgggcccaccaaccagaaggtcatgaacctctcccatcgcctttgagcgacatgaaagcggaatcctccgcgacaattcattcgacttaataggtgaacagaaatgcctgtacgcgaacttggtaaaaaattcaaaaaccagaccatcaacgggatgactaatcccatcacggtgctgatctctccagcagataatgtgaatggcgtcatccttcgatctttctacggtgccggcaccatggcttttgggccaaaggttcctaccgtcaaagatcgggacgatagtgttctgcaggaagttgccccaaacgtcctcgcctacaacgatttggccgtaccggctgggcttggtgtctatatctacaacattcagaactacgttctgccaaccaaactgtcgtgggacaccctgaacgcagacggtaccgttgcataggccgcgctgaagggcatagccctgatctcgtactgggcttttaggcaataccgcgcggcataggccgcgcaactatccaaggcctcgccatcgtgcggggcctttccgttttcggctcctccacacacatcgctccgagctgggagtgctggcggggctgacctatttcaaacatgccccacggagtcgagcgcatggagtatctacagcgcctgctcgacaagatcgacaggttcgaattattgatcgcgggcctcgttggggcggtgatcgccagttggtggcacaaggactacctggcggattggcatgcctgggtgatcttcttaatcacagggggggcgcgagttcgttgcacctgactgggatggtcagtgcctatcgcagttccaacacggacgttggtttgtctacctaggggggctttcaaggtgactgtggtgttgataacgcagcctcaattgattcaaatcatgccaggcgctcgccgtatggcgggccttttttcaaccgcgctgaatgcgacttttgctcggtacgaaatcaacagcgtattgcgcgctgctgcttttctcgcgcagatcggccacgagtccggcgaactgcactacgtgcgcgaactcggcagcgatacttatttgagcaagtacgacaccggcacactggctgcgcgcctgggcaatacgcccgaagcggacggcgacggccagaagtaccggggccggggtctgatccagatcaccggtcgccgcaactacctggcctgcagccaggccctgtttggcgacgaacgcttgctgcaacaacccgagctgctggagcaaccgcaatgggcctgtgaatccgccgcctggttctggcaaagcaatggcctgaatgaactcgccgacaaggaccagttcaccaccatcacccgtcgcatcaatggcgggctcaatggcctggaggatcgtttgcagttgtgggcgcgggcgaaggcggtgctatgcgtttcctaggtgtgctttgcgtatgcgtgctggtgactgttgtctggcaggtgcaggcgtggcgatacggggcgcagattgaacgtctgtcggcgacacagacccgggcagcccagcaacaacagcaggccgaacaagacaagcggctggcccttgagcaacaactcagtgccagcgaccagcaacatgcctgggagttgagcgatgcccaacgtactcaaacggctttgcgtgatcgcattgccactgctgatgtgcggctgtcagtccttctcgacgcttccagtggctgccccatgccggccgccaccgccgccggcagcgtggttcatgcagccccgcgagcccgacttgacccagcgcatgctcagcgaattatccgcatcaccgacgacggcgacagcgccctgattgccttgcgtgcctgccaggcgtatgtgcgcgccgtcgcccgttagtgtcttgagacagtccgtcacttgcgtgtgagattgtctcctgtagggtaggcgaacccccgcccacgactggagacgaccgtgaaggaaatcactcaactggctgccgaactgggtcgccgcctgcaggtgctcaacgcccacgtcaccacggccgagtcgtgcaccggcggcggtatcgcggaggccatcacacggattccggggagctcggcctggttcgaggcgggttatgtcacctattccaatcggcagaagacccggcaattgaacgtgccggaagccttgtttgcaaaagtcggggcggtcagccaggaagtagtcgaggcaatggtccgtggcgcccaggaaaaaagcctggcgcggtttgccgtggcggtcagcggcgtggcgggaccggacggcggttcgccggataaaccggtgggcaccgtatggctggggtttggcgtgggggaagaggtcacggtcgagcttgagcacttcactggcaaccgcgaggaggtccgccgacaaacggtaaaggccgcgctagagggcttgttgcgacgagctgcagcagaaatagaaaatcaggggtaggcgatccctgatctttgtggaacaatactgtctacttatacaggtgttggccgaccaggccttattgattacgtgaggactttaatggacgacaacaagaagaaagccttggctgcggccctgggtcagatcgaacgtcaattcggcaagggtgccgtaatgcgtatgggcgatcacgaccgtcaggcgatcccggctatttccactggctctctgggtctggacatcgcactcggcattggcggcctgccaaaaggccgtatcgttgaaatctacggtcctgaatcttccggtaaaaccaccctgaccctgtcggtgattgcccaggcgcagaaaatgggcgccacctgcgcgttcgtcgatgccgagcacgccctggaccctgaatacgccggcaagctgggcgtcaacgtcgacgacctgctggtctcccagccggacaccggtgagcaggccctggaaatcaccgacatgctggtgcgctccaacgccatcgacgtgatcgtggtcgactccgtggcagccctggtccccaaggctgaaatcgaaggcgagatgggtgacatgcacgtgggcctgcaagcccgtctgatgtcccaggcgctgcgtaaaatcaccggtaacatcaagaacgccaactgcctggtgatcttcatcaaccagatccgcatgaagatcggcgtgatgttcggcagcccggaaaccaccaccggtggtaatgcgctgaagttctacgcttcggtccgtctggatatccgccgtaccggcgcggtgaaagaaggtgacgaggttgttggtagcgaaacccgcgtcaaagtcgtgaagaacaaagtggccccgcctttccgtcaggccgagttccagattctctacggcaagggtatctacctgaatggcgagatgatcgacctgggcgtgctgcacggtttcgtcgagaaatccggtgcctggtatgcctacaacggcagcaagatcggccaaggcaaggccaactcggccaagttcctggcggataacccggacatcgccgccacgcttgaaaagcagattcgcgacaagttgctgactgcagcgccagacgtgaaagctgccgccaaccgcgagccggttgaagaagtggaagaagctgacactgacatctgaagcaaacgatgactgttgtactggatacactcgtcgccgttcggcgcaccgcaatggacctgctcgctcgccgcgagcatggtcgagtcgagctgacgcgtaaactgcgtcagcgcggtgcggagtccgagatgatcgaaaccgccctcgaccgcttgacggaagaggggctgctttccgaatcccgttaccttgaaagttttgtctcctaccgggcgcgttctggttacggcccggcacgcattcgtgaagaactgagccagcgtggcctgcaacgagctgatatcgaccttgcattacgtgagtgcggcatcagttggcaggcgcagttggaagacacctggcgacgcaagttttctggccatcttcccattgatgccaaggagcgtgcgaaacaggggcgtttcctgagctatcgcgggttttcgatggagatgatcagccgcttattgagcggtcgggatatggacgactaaacaccttgctgtgctggccgcattggcgaacagactttctatggcgagcggatttgctgtggtgactgggcttgttgcggtgagcgggcttgccccgcgttgggctgcgcagcagccccaaacccctcccctccgctgcacccgaaacaccaccaaaaagacccactatgaaaatagtgggtctttttttttgccctcaaaaaatcacgccggctccggcgcaacccgctgctgcgccttcccctgagcctgcgcccagttctccggcaggttgatgtaatccaccaactcccgtagccggccctgatcgcgaccattgaagttgaacaccagccgcgtcaaatggctgaaccgtggctcatcatgttcctcgccggtgtacgcgagctgttgaaactctccgctcaaccgcaggctggaaaattcagtctgcaaatgggccaatgccccatcgctgagcgggtgatgcatgcgcaccacaaactcacgcttcaaccagcgggtggagtggaagttagcataaaactggttgatctcttccaccgcctcttcggcgctgtacaccaggcgtatcagcttgagatcggtaggcaggatgtagcggttggcttccaactgactgcggataaagtccagggcgccttgccagaacccgccgcctggcgcgtccagtaacaccaccggcaccaatgggctcttgcctgtctggatcagggtcagtacttccagtgcttcatccagggtgccgaaaccgcctgggcacagtaccagcgcatcggcttccttgacgaagaacagcttgcgggtaaagaagaagtggaaggacagcaggttctcggtgccatcaatggtcgggttggcgtgctgttcaaacggcagggtgatattgaaccccaggctgtgttccaggcccgcgccttcgtgggcggccgccatgatgccgccgccaccgccggtgatcaccatcaaatcagaacgtgccagtgcagcgccgacttcgcgggccagggcgtacagcgggctttccaccggagtgcgcgctgagccgaataccgttactttgcggcggcccttgaactgttcgagcacgcggaaggcattgtccagttcacggatggcttgcagggtgatcttggcgttccagcgattgcggtcgtcctgggccatgcgcagcacggtgaggatcatgtcgcgatacaggggaatattcgggctgttgggagcgatcagctggagttgggcgtcgacctgctgcgtaaggtcagcaccgttttcttcaaagtgccgaagcaggcggtcattcggttcgtaaggcattcaacttctccttattgcagggcccgggtggccgacgagccgttcgccggaggctacgacactgcatgtgtcgttgcttgccgcagggggcaaccttcttttgccctgaaaatgttacagaacagcatgaaaagtgctgtgaatgaatggtcgggatgacttgatcatgggccgcaaaacccttggctggcaaccgcttattggtcactcgtcagggagtttagctgttggcaggatgttgaagcggggaagtgcgcgccaccgggcggcagcgcgcgaaggtcacgctgttactttttcttttttgccgccgccggtgccgggcaatccgcttcgatgaacttcaccgaggccacaggacggttggtcttgttctcggtgatttcgtagcgcatcactgcgcccttggccatcagctcgcggtagcccttgttcaggcacacgctctggcccagctggaaatacaccgccttggggttggcgcgcatctgttcggcgcggtcaggcaggacgctcaggtgatcgatcagttgcatgccttccacggtgtaggccacttccagggtcttttcgtcgatttcccggggcaggtccttattactttcggccgcgacgctttgcagcttccggttcatttgggcctccagcagcgaggccgcctgggcgcacacgggcaataccagcgcgagggcgacggatggggcgacaaaacgcagcatggaacgcagcatgaaactctcctgattcggttactggtgcatagaccagccactgcgctgtgcgttcagtggcgcgcaattataggtgagcccttgccactacagccaggcgtatcgctggtaaactgcggccacttccgccttccacgagttttcaccgtgtcgatttacccgtcccaacggcatagccgatgagccacgccgtttcccgcctgcgcacccagcgcctggcccgtgccgtgcggccgttcctcaatcgtggctcgcgtgccgaacgttgccccggctgccgggtcatccccgaatactgcctatgcgcctggcgacccaaggtcgaagcgcgctccgccatgtgcctgctgatgcatgacgttgagcccatgaagcccagcaacaccggttggctgattgccgatgtcatcaaggacaccacggcattcgcctggtcgcgcactgaggtcgaccctgaactgctcacgttgctcgccgatccgcagtggcagccctatatcgtgttccccggcgaattcgtcgtgcccgagcgcgtcgtcagtgaagtcaaggtggaggagggcaagcgcccgctgttcatcctgctggatggcacttggagtgaagcgcgcaagatgttccgcaaaagcccctacctggaacatttgccggtgctcagcctggcgccggaacagctgtcacgctacaaactgcgccgttcaaagcgtgatgaccacttctgcaccgctgaagtcgccgccctgtgtctggaactggccgatgatccagtcgccagtgaagtcctggacgcctacctggatgtcttcagcacccattacctggccgccaagttccagatgccgctggatccgacggacactgtgcatacgcgccttgcgccctatattccgacggcgtaaccagacgacgtttgcatgatggcaccacgcacccgcaacccgctaaaatgcccacgggcgtagtgcttgaccctccaggctacgctgggcatgctgggcgccgatcagggcccccctaaaaacaggatcatttaaacaatggccacatacgaaatcctgatagccgatgaccacccgctgtttcgcagtgcgttgcatcaggccgtgacccttggccttggcccggacgtgcgcctggttgaagtggccagcattgctgaattggaagcccgcctcaccgaaaaatccgactgggacctggtgctgctcgacctgaacatgccgggcgcctacggtttctccgggctggtgctgttgcgcggtcaatacccgcagatccccgtggtgatggtctcggcccaggaagaggccgacgtggtggtgcgctccaaggagttcggcgccagtggtttcattcccaagtccagtgcgatggaagatatccagaaagccgtgcgcactgtgctggatggcgacgtgtcctggccgccgcaggcttttgaagaaatcaacgtgtccgacgaagccaaggctgcccgtgatggccttgccagcctgacgccccagcagttccgggtgctcaccatggtctgcgaaggcctgttgaacaagcagatagcctatgagctgagtgtgtcggaagcgacgatcaaagcccatgtgacggcgatcttccgcaagctgggcgtacgcacacgcacccaggcggcgctgctcttgcaacaacttgagtcaatttcgcagcactaacgtgtttccgattcacgcttttttgactttgcgtgatctagttttcccacttctttggttcagttgcctacatctatgtcgcctttcaagggtcaaaccggtatcaaacgtatcttcaatgctgggggatattccctggatggtctgcgcgcggcgtttaccggcgaggcggccttccgccagttggtgttgctcaacgtgatcctgatcccggtgagcttctttctgaatgtcagccgggtcgagcgcgcgttgcttatcgccgtatgtttacttgcgttgatcgtcgagttgctcaactcagcggtagaggctgcgatcgaccgcatctccctcgaccgccacccgctgtcgaaaaacgccaaggacatgggcagcgccgcgcaattcgtggcgctgaccatgatcaccctggtgtgggccgtgatcctgatctaagcctcaggcaatacttggcaacacgatctcgtcgctgcgctgcaccccggcggtgaaggcgcggcacagttcgaggaattcgcgcatcgccgaggtctggtacttctgtttatgccagatgaagtagaactgccgagccaggtccaggtccggggtttccaccggcaccaggctgccgcggcggaacgcgtcgcgcagcgccagtcgcgaaatgcagccaatccccagtcccgattccaccgcacgcttgatcgcctcggtgtgttccagctccaggcggatattcagcgcgctacggtgatggcgcatggcttggtcgaaggtcaggcgcgtgcccgagccttgctcccgcaggatccaggcctcgtgggtcaactcatccatgctcgccacgccacgcttggccagatgatgctgcggcgcgcaaaacaccaccagttcatcttccacccaggtttgcacctcgatatccgggtggctgcagtcgccttcgattagacccaggtcaatttcgtaatgcgcaacttggtgcacgatatgtgcagtgttctgcacatgcagtttcacctggctctcggggtgctgttgcatgaagctgccgatcagcagggtggccaggtagttgccgatggtcagtgtggcgccgaccgccagggagccgaagccggacttgccgttgagcaggtcttcgatctccttggcctggtccagcagcgctaccgcctggggcaacagttgatgaccgagcgcgttgaggctcaggcgtttgcccgcgcggtcgaacaattggcagctggattgacgctccagctcggtgatcgaggtgctggcggcggattgagataaggccagaaggccagcagcgcgggagacgctttcctgctgggcgacggcgacgaagacttgcagttgacggagagtaaatcgcatatcgatataaccgataacccttatcttaataatccagttaacagatattgtcgccgccattagaatgctgtgcaattgcgcaactacatttggcgcagacccatttccaggagtcccccgtacatgagcaacatgaaccacgagcgtgtcctcagtgttcatcactggaacgacactctgttcagcttcaagtgcacccgcgatccgggcctgcgcttcgagaacggtcagttcgtgatgatcggcctgcaacaacccaacggccgcccgctcatgcgcgcttactccattgccagcccgaactgggaagagcatctggagttcttcagcatcaaggtgcccgatggcccgctgacttcccaattgcagcacttgaaggaaggcgacgagatcatcatcagcaaaaagccgacaggcaccctggtgcttgacgatttgaagccgggcaaacacctttacctgctcagcaccggtactggccttgctccgttcatgagtgtgatccaggacccggaaacctacgagcgtttcgaaaaggtgatcctgtgccacggcgtgcgttacgtcaacgaagtcgcctaccgtgaattcatcaccgagcacctgccgcagaacgaatttttcggcgaggccctgcgtgacaagctgatctactacccgaccgtgacccgcgagccgttcgaaaacgaaggtcgcctgaccgacctgatgcgcagcggcaagctgttcagcgacatcggcctgccgccgatcaatcctgaagacgaccgcgccatgctgtgcggcagcccaagcatgttggatgaaaccagcgaagtgctgaacagcttcggcctgaaggtttcgccacgtatgcgtgagccgggtgattacctgatcgagcgcgcattcgtcgagaagtaagaaagtcaggcaatatgctgactgggccacacagaacatccaaatgtgggagggggcttgcccccgatgagtgcgtgtcagttgatacatctgtagctgacacaccgctatcgggggcaagtcccctcccacattgggttttcggtttatccagccggtagcacttccaacacacaaatcacccccgcctctggatagtgccaacgcacatccacatcccagaactgcgccccgtattcccgctccggccccggcacctgatacgccggccgtggatcctgcgccaggcactgatcaatcagttcaaccagcggctcgccaaggcgctgagcatgctcttgtgcctgttgcagcgcagtcttcagccactgcacggggatcagctgcggcgctgtgctggcgatgctgttggtggctgtgtcgacaatgtcggcatacggcacatacggcttgatatccaggataggcgtgccatccagcaagtcgatccccgagacccacaggcgccccggttccaccttgtccagcttgactactgactggccgattccgttggggcgatgggtcgcacgggtggcaaacacgcccatggatgtattgccgcccaggcgcggcgggcgcactttcaggcgcggcttgtcttccagtgcctggtgaaacaggaacagcaaccacacatggctgacctgctccaggccttgcaccgcttcacctccatcgaacggcgccaccagctccagcacgccacgggcggccggcgccaactgcggttggcgcgggatggcgaacttctccttgaagcaggagcgtacgaaaccgacgggtgagacctggtaactcatggcttacgcacgaacccgcagggtcaggcccttgaggaaattacgcagcaactggtcgccgcacggacggtagttggtgtggccgaacttgcgaaacagcgcgctcagctccggcttggacaccgggaactcggcggccttgaggatggcgtgcatgtcgtcttccttcagctcgaaggccacgcgcagtttcttgaggatgatgttgttggtcaccggcgtttcgatcggctgcggcggacggctttcgtccttgccgcgcttgaagatcaccaggccatcgaggaaatgcgccatgacgtcgtccgggcagaacacgaagccttcttcctcgtccttcttgaggtaggtgagcaggtcgtccttggtcacgtccatgccgccgagcttgatgatctcgaccatcttgttgtcgctgatgtcgagcatgtagcgcacgctgcgcagtacgtcgttgtgaatcatggtgggcaatcctggtattcaactgaggacaccgccagtcaggcggtgtcggaaaagggcggcggcttagaacttctctttgccgctcaggtaacgccactggccgaccggcactttgccgatggacacgccaccgatgcggatacggcgaatggcgatgactttgaggccaaccgcttcacagaacagcgcgatcacgcctggctgcgggtttttcatcgcaaaacgcaggcggttttcgttctgccagctggctttgaccgcaggcagctctttgcctttgtaggtcaggccgtggttcaggcggttgaggccgtgggcaaccatatcgccttcgacctccaccacgtattcctgctcgatcttggccgcatcggcggtcaacttgcgcaggatcttccagtcctgggtgaacaccagcaggccgctggccttggcttgcaggtcggcgctggcggtcaggcgcaggaagtgccccttgagcgggcgcttgccgaagcgatgttcttccgagagtgtttcggcgctgatcgacgccatggccgtttcggcatccacgccggccggggcgtgcagcaggatggtcaccggttcgggcgcggtggccttggcctccgggtcgagttcgactttctgggtggtgaccttgaactgcggttcgtcgatcacttcactgtccaccgagacccagccgccttcgatgaacagctcagcctcccgacgggagcaaccgaccagttcgataaggcgtttggagaggcgtatggggtcagtcatgacaagggccgtaacaaaagggggcggctattgtacctgtgtgggcgcggttaatcccggctccatttcatttagccttggcgggtatgttgttgtatctggcgcaaacgcatatgcagtaacggataaggctggccgagcccatcatgctccgtgcgtccgatcacctcaaagccttgtttgaagtagaagcccagcgcctggtggttctgttcgttgacgtccagcgcttcggcgttcaagtgctcgattgcataccgcagcaattgccggcccaggccaccaccccggtgctgcgggtcgataaacaacatctcgaccttgccagccgctaccccggcaaacccagtgatgcgttggcgggcgtccttggtgcagatcagcatcacggcatccaggtagcgggacagcaccaggtttttcaacaactcgatgtaagtgtctggcagaaagtcatgggtggcgcgtaccgaggcctcccagatccgcgccaactcggggtagtcgctggttttaggtgtgtggataaccgaatgctgacgcatgcccgctgccccttgccgatgttcggcgctgatgggcaaaacgatagacctaaaaaagccccgcatcttgtccagaagcagggctttttgatttttttacgccgatcagtcgcgcttttcagcccacaggtcgtattcatcggcatcggtcacggtgcaccagaccttgtcgcctggtttcaaaccgctggcatcgtcgatgaacacgttaccgtcgatctccggcgcatcgaagaagcagcggccaacggcgccttgctcgtcgacttcgtcgatcagcacttcgatctccttgccgatacgcagttgcaggcgcgccgagctgatggcctgttggtgcgccatgaaacgctcccaacggtcctgcttgacgtcgtccggcaccacggccaggtccagcaggttggcgggggcgccttccaccggcgaatactggaagcagccgacgcggtccagttgggcttcggtcagccagtccagcaggtactggaaatcttcttcggtttcgccggggaagccgacgatgaaggtcgagcggatgatcagctccgggcagatctcgcgccaattcttgatgcgcgccagggtcttgtcttcgaaggccgggcgtttcatggccttgagcactttcgggctggcgtgctggaacgggatgtccaggtacggcaggatcttgcctgcggccatcagcgggatcagctcgtccacgtgcgggtacgggtagacatagtgcagacgcacccacacacccaggctgctcaaggcttcgcagagttcggtcatgcgggttttcaccggtgcgccgttccagaaaccggtgcggtatttcacgtcgacgccgtaggcgctggtgtcctgggagatcaccagcagctctttgacgccggacttgaccaggcgttgggcttcgtcgagtacgtcaccgaccggacggctgaccaacttgccgcgcatcgacgggatgatgcagaagctgcagctgtggttgcagccttcggaaatcttcaggtacgcgtagtggcgcggggtcagcttgatgccttgcggcggcaccaggtcgatcagcgggttgtggtcctggcgcggtggcaccacctcgtgcacggcgttgaccacctgctcgtactgctgcgggccggtcaccgccagcacgctcgggtgcacgttgcggatattgccttcttccacacccatgcagccggtcacgatgaccttgccgttttccttgatggcctcgccgatcacttccagggactcagccttggccgagtcgatgaagccgcaggtgttgaccaccaccacgtcagcgtcctggtaggtggacacaacgtcgtagccttccatacgcagttgcgtgaggatgcgctcggagtcgaccagagccttcgggcaacccagggaaacaaagccaaccttggggttggcttttgcgatggtggtggacatgtctaacctcggtattgaatgacgccgcccgtcgggcacgacagggctgcggacgggcgcttggtgcgcctctgatcaaaaagtgcgcaattctagcgatgggcagcgcacttgaccagctttatgcagggaaatgcgacgagtgctgttttgggccattcaagcggtccttactctacctttaggctcggaggtcctgctctgtacggtgcgctacaactttagacatgcctacacctaaagcctgaagtactttcaggagggtggagagcttagggtcgccgccgacggcgatggatcggtagagattggctctattgagccccgtgttctgcgacaaactgagcattccgccacgagcttccgccactcgacggatagcaacgaggaaggcgtcctcaccacccgcttcatcgatttcctcaagcgcgacagatagatactcgagcgcaaacgcttcgtcgtcgcggagcatttcaagaacgctgtcttcgtgagagcgcgtacgaatggtcatttttgctgcaccttgtaagatttccagagagctttggcctgatcgatgtcgttctgctgcctggcctctgagccaccgcccaacaggaaaataattttccgatcctggattgcgtaatacacgcgaaaaccaggcccgaagtctagcttcatctcaaagaccccttcacccacaggttcggtagcgccaaagtgaccgagggacgctcgatctactctggtggtgattcttgcttttgaacgtgtgtcctgcacggtgtctagccaggcttggtatatatccacgccgttgactgagagtacgtgtttcacttcgtacatgaggactgtaccttaaaagagacagagtgatgattgagtttctgtatcgaatgggcgcgccaacaagcagaggcaagatttattgctcaggtgggccggccaaggagctctcgattacgccgtcgatgcggcactgcggaggcgggccgaatatacggttgagcgtagatgtgatcaatgcaggcaaaaaggctccaaagtgccttgccctctatgagcggttgcacaaaaccccacccaaatcacttgaacagcgaaatgcgacgagtgctgcgctatgcttcgcgccgttgtgcgtaggtaaaaccctaaggtcaacaaaacgtctgttacgagaagtaaaacggcgcatgctagggtcagcttagacgcgttgttaataaaagaccgcaggtcaaagggcaggagtggttgatgggtcacgcgagtagtcaggcagcaggtgccgagcagtcaaacgccaagccgattggcatgctggtggcagcggtcggggtggtttacggcgatatcgggaccagcccgctgtacaccctcaaagaggtgttcaacggcggttatggggttcaggtcaaccatgatggcgtgctggggatcctagcgctgatcttctggtcgctgatctgggtggtctcgatcaaatacatgctgttcgtgctgcgcgccgataaccagggcgagggcggcatcatggcccttacggctctggcacggcgggcggcgggggagcgcaagaagctgcgcagtttcctcgtggtgtgcggcctgtgtggcgcggcgctgttctatggcgacagcatgatcaccccggcgatttccgtattgtccgcggtggagggcctggaactggcgttcgatggcctggagaaatgggtcgtgcccatcgccctggtggtgctggtggcgctgttcctgatccagaagcacggcaccgatcatatcggcaagctgttcgggccggtgatggtgacctggtttctggtgctcggcggattgggagtgtatggcatcaccctgcaccctgaagtactcagtgccatgaacccgatgtgggccatacgcttcttcgaggctcaccccggcattggcgtagccatcctcggcgcggtggtgctggcactgaccggcgccgaagcgctgtatgccgacatgggccacttcgggcgcaaacctattgcccgggcgtggttcatgctggtgctgccggcgttggtgctcaattatttcggtcagggcgccatgctgctgggtgatccggaagccgcgcgcaacccgttctacctgctggccccgagctgggcgctgatcccgctggtggtgttgtccaccctggccacggtgatcgcgtcccaggcggtgatttccggtgcgttctcgttgacgcgccaggcgatccagctgggttacatcccgcgtatgcatatccaacacacctccagcgccgaacagggccagatctacatcggtgcggtgaactggtcgctgatggtcggtgtgatcctgctggtgctcggcttcgaatcctccaacgcactggcatcggcctacggcgtggcggtgaccggcactatgctgatgaccactatcctggtgtcggcggtgatgctgctgctgtggaaatggccaccgatcctggccgtgccggtcctggtctgctgcctgttggtcgacgggctgtattttgccgccaacgtgccgaagatcatccagggcggcgctttcccggtgctggcggggattgtgctgttcgtgctgatgaccacctggaagcgcggcaaacaactgctggtggagcgcctcgacgaaggcggcctgccgttgccgatctttatcggcagtatccgcgtgcagccgccccatcgcgtgcagggtaccgccgtgttcctcaccgcgcgcccggacgccgtgccccacgcgctgttgcacaacttgctgcataaccaggtgttgcatgagcaagtggtgctgctgacggtggtctacgaggatattccccgcgtaccggctgcacggcgcttcgaggtggactcctacggcgaaggcttcttccgcgttatcctgcactttggttttaccgatgagccggacgtgcccgaagcgctgaagttgtgtcacctcgatgacctggatttcagcccgatgcgtaccacctacttcctcagccgcgaaacggtgatcgcctcgcgcatcaagggcatggcccgttggcgcgaagggttgttcgccttcatgttgaagaacgccaacggcaacctgcgcttcttcaagctgccggtcaaccgcgtgatcgagctgggcacccaggtcgaaatgtaagcggcagtcacacgggagccggcaatcggctcccgcttttccttctgaaccctgtgcaatccagcgttgtcgactaggctctaagcaccgtttgaatagtgcccacagaacccagaagaggtgcgccatgagtcagctgctcgaaccctataccctccgtcaattgaccctgctcaaccgcatcgcggtttcaccgatgtgccaatactcaagcgacgacggcctggccaatgactggcacctggtgcacctgggcagccgtgccgtcggtggcgccgggctgattttcaccgaagccaccgccgtgaccgccgatggccgcatcaccgcccaggaccttggcctgtggaacgatgcccagatcgaaccgctgcaacgcatcacgcgtttcattgcggcccagggcgcagtggccggcattcaactggcccacgccgggcgcaaggccagcacccaccggccgtggattggcaagcatggcagcgtcaagcccgaggatggcggctgggtacccgtgggaccgtcaccgattgccttcgacccccagcacacccaacccaagcagttggacgaagggcagatccagcaagtgattgccgattttgtcgccgcagccaagcgcgcattgaccgccggtttcgaagtggtggaaatccacgcggcccatggctatctactgcatcaattcctgtctccgatcagcaaccaacgccaggaccagtacggtggctcgtttgaaaaccgcatccgcctgttgctgcaagtgaccaaggcagtgcgtgaggtctggccccaggagctgccgctgtttgtgcgggtatcggccaccgactgggtggaagacggctggaacccggatgaaaccgtggagttggcacgtcgcctgaaagacctgggagtggacctgatcgacgtttcgtctggtggcaccgccgccaacgccgagatccccaccggtcctggctaccagacccgcttcgccgagcgcgtgcgcaaggagtcgggcatcaccaccggcaccgtgggcatgatcaccgagccggcccaggccgagcacatcctgcgcacgtgccaggcggatatcatcttccttgcccgtgagctgttgcgcgacccgtactggccgttgcacgccgatgatgacctgggtgggcgcaaggcaatctggccggcgcagtaccagcgcgcaacccatcgtgaccagcccattcatgaatcagatttgagagattgagccctgacacgctccgccgaaacccaccctcacccggtgggtttttttgcgttcatagcgtgggatcacgctgtaggtatttgttaccgatgtaattatttaagtgattactctaaaaaaatcgcacgctcggcgagatcgtttctacgcttagggtaagcctgatttctggcccaggaagtcagtcggttttcccacacagacgttgcgctttagggagaagggtaatgggcaccaggagtatttgatggatatcaggagaagcagtccatggccaagtcctatggtgtagcgggtgcggtagcgtcttttctgacccgcagggtgtctttgcgcgggcgaaggttgagctcggatgaagaggagttgctggcgcagtaccgcgcactgaccgagaacgatcaggtggcgatgcgttatttgattggggcgatgaagagtgtgtcgcggttctgaaacgaggagggggcgttcccacgcaagcgtgggaacgcggtgcatcaggtgtacttgcgctggtccggtgccggcgggaagtactggtacagccaggtttcgctcaaggtgcggtcctgggtgcgaatgaacaggcgcagttccaccggctccacgctgtcgctggtcgggtaccagtcgaacaggatgcggtagcccttgatgttatccagtaccagcacgctgaagtccttcacctggccatgggaacaggtcaccaccggctcgatgccggtgcctggcggcaggcgatccaggccgccgcccttgaagtccacggcaaagcggcgcgcccagacttgcgggtagtgctcacccggtgcccagccttcggtgaagccacccatgcccgagcgggttgcatcgacttgcgccaacggcgtgctcaccggcggcagcgcgctccagtacaacttgtagccatagttgagtgaatcgccggcggccacgggttttttcggagtccagaaggccacgatgttatcgagcgtctcgccggtggtagggatttccagcaggtcgatcgagccttcgccccaggcggtggtcggttcgacccacaggctcgggcgcttgctgtaccagtccacggtgtcctgatagctggcgaactcatggtcggtctgcaccaggccgaagcctttcgggtctttatcggcaaacgcgttgaattgcagcttggccggattgttcagcgggcggcagatccactcgccgttgccgcgccacatggccaggcggtccgagtcgtggatctgcgggtggatggtgtcgcacatgcggcgctcgtgggtgccgcaactgaacatgctggtcattggcgcgatgcccagttgttcgatggtggtacgcgcattgatatgcgcgtcgatggccatcaccacctggttggcctggcagtcgatatcaaagcggtacgcgccggtggcgctcggcgagtcgagcagggcgtagaccacgaagcgggtggcgttcttgtccggggtttcgaaccagaactgcgtgaagtcggggaactcctcgcgttttttcgcgtaggtgtcgatggccaggccacgggcggaaaggccgtactggccggtggaatccaccgcacggaagtagctggcaccgaggaatgacagcacgtcatggcggtccagctccggcgccttgaacagcttgaagccggagaagcccaggtcgccggtcagctgtttggtgtcgaccgtggttttttcgtagttgaacagcgaaggacggaaatgcacctcacgggcttcgcgggtcttggggtcgacgctgtgcatgcgcaccggcgtcttgaagcccatgccgacgtggaagaactgcacgtccagttggccgttcaattccttccacagcgaatggttgccgtcgtagccgatggcgttgaaattctgcggggtcatggtcgccagcgtgggcggcagcacctgtttggtgtccttgtaagcggtcccggcgagttgtttggcctgggccttgagcgtgtcgaagtcgaacgccacggccttgccatcggcagcacggttcccggcccaggcctgggcggcgagcaggccgctggccgacaaaccggtgtaagccgcaatggccatggacgctttgagcaaattcctgcggtgcatagagacaacctgtcgtgagcaaatcccgcgccgttcctggcgcgtagcggatcagaaattacggttcggacatgccttcgaccaaacgcaacggacattaaacagacgccggatagcttaagcggttcgatgacgtaggaaaattgattgatagcggcacgatggcattgcatatgcgacaagacatttccaattctgtggccaaaacactacttacgaaatatgaagatccaaatgtgggagggggcttgcccccgatagcggtatgccagtcactgaatactgcgcaggtccaactcaatcgggggcaagccccctcccacatttaggctgcatttcaggcgacttcacccactgctctgaacgcctcatcaatcgccgcatgggcatacgcactccacgccgcgtccgagttggcgatgctcacatgccccagcggctttttcgccagcttcatccacgcttcggtttcatcggcatcatcgaacaagctgttggagaagctcgcataaccgtgtgaccagcggttgacagtgatcgccagaatatcggtctgatggttgaaaccacccgggccaagcatgcgttgcagctggtcacgcaactgcgtttccaactgttcgaaggtctggccatacaacttgccacgcccggcgcgggcctggtcgcgggcgttcatgccgctgttggggctggtgggcacgtagaccatgtgcaagccgatcggctgcgtcgggtcgcgcgggtggtcatagccgcccatgcttaccgggtagtccagtttgatccggctgtagggctgggtcgccgcgtaaatctcgtgcacgccgagcttctggaacgactgccaattgcggatcaccaccttggtgtacaccagcgggtacttcacgttctggctcagggcgtgagcttgcggtgccggcaaatctttcaacagatacggaatcatcatgttgtagcaggccaggatgcagcgtttgccacgcacttgtgcgagttgtccgccacggctgtagccgatatgcacgccgtcgccgacattacgcacgctgaccgccgtgctgttcagtcgcaggcgtacggcggccttgggctggtcgagcttggcgtagtcgaacgccgccagcacgatatcgtccatggtgtgccctggtgccacgcccgggatcaggctgcgtaccagcaagcgcgccaccgatgcattgccgtccgggaagtgatagatgtagggctcttccatttcagcagcggcttcttcgctgatcggcgccagattcatcccggcaaaacctgggaaacccacgttgtaggcatcggccgacgccacggcatcaatgctcagcgccatgaagtcattggtgcggctctggaagtacttcactgcgccttccgacaggcctacgttcttcagcaggaaatcgcggtagctggtggctgccaaatagtcggccttttctttggcggtcttacctggcaggtagtctttgggcgcggtgtgcaactcgatcaaggcctgacggtctgccgccggcaacgggaagtcattgatgaaatcgcggagggctcgtgcgttgagttggtcgggggcgatgtcgtcggcgaccattggcgtcgggtcgccggtcaccagcttgtcttcgccgaagttttccttgtcgaaaaacaccccgcgcgacagcccgaggccagggtagaactggcggtcgaaggcggtttcgaagcgcttgatgttcacgccgagctttttcaacagcccgttcacttccttgctgtacaggtggttgggcgactggaacgcctcgctgccaccgtagccgatgatcatgcggccaccggcctggaattcattgcgcttggcgtggccgccgaagtcgtcgtggttttccaggatcaggatcttcgccttggggtgcttctcgcggtagaaccacgccgccgacagcccactcaggccgccacccacgaccaccaggtcatagtactcggtgatcggcagcttgtcggtgtcgaacaccttcttttcccagcccatctggtgcgccacttcgaacgaaccggcgtggctgccgcgcaggccggtcagggcaggagggtagtaacgaccgtcgggggcggcttgcaggatttgcagtggggtcatgccggcggcgatggtgacagcgacgccgttgaggaagtcgcggcgggtgatatccatgggggatcctgagcattattgttataggttcccggcatccaggaaggatgccgggttgaatcgtcagtgcttgaacatcacatgccgcacggtggtgtagtcctccagcccgtacatggacatgtccttgccatagccggacagtttctgaccgccgtgaggcatttcgctgaccagcatgaagtgggtgttcacccaggtgcagccgtactgcagacgtgcggccaagcgatgggcgcgtcctacatcggcggtccacacggacgaggccagcccgtagtccgaatcgttggcccagcccagcacctgagcttcatcgttgaacttggtcactgataccaccggcccgaagacttcgcggcgcacgatctcgtcgtcttgttgcgcgtcggccagtacggtgggttcaaagaagaagccattgccttccacggccttgccgccggtcaccaggcgaatatgcggttgtgccacggcccgctcgacaaacccggcgacacggtcgcgatgctgcgcggtgatcaatggccccaactcggtggccgggtcatcctgcaatccatatttgatactggcgaccgccacgccgagtttctcgacaaacgcatcgtagatatcggcctgtgcataaatacggcacgccgcggtgcaatcctgcccagcgttatagaagccgaaggtgcgaatgccttccacggcggcgtcgatatccgcatcgttgaagatgatcaccggcgccttgccgcccaactccatgtgcatgcgcttcacgctgtcggcggtgctggagatgatgtttgcgccggtggcgatggagccggtcagcgacaccatgcgcactttagggtgcgtcaccagtgggctgcccacggttggcccacggccaaataccaggttgagcacaccggccgggaaaatatcagcggccagttcgaccatgcgcaaggccgtcagcggggtttgctccgacggcttgagcaccacggtattcccggcggcgagggccggggcgattttccaggcgaccatcatcagcgggtagttccacggcgcgatggacgcgatcacgcccaccgggtcgcggcggatcatcgaggtgtggccgggcaggtattcaccgccggccgaaccgctcatgcagcggctggcgccggcaaagaaacggaacacgtcggcaatcgccgggatttcatcgttgagcgcggcgctgtagggcttgccgcagttgtccgattccagcttggccagttcttcgccgtgggcctcgatcacgtccgccagtttcagcagcagcagcgaacgatccttgggtgcggtttgcgaccagccttcgaaggccgcatcggcggcgcgtacggcggcgtcgacctgggcttcgctggcttccttgatttctaccagtacgcgaccgagcgccgggttgaatacagcctgcgccgggccttcgccttcgaccagttggccgttgatcagtaatttggtttgcatggttcagctctccaccaactatcgttatttccttgaataaactggctctaaatgtgggagggggcttgcccccgatagcaatcttccagtcacaccctctacaactgacccactgccatcgggggcaagccccctcccacatttgaaccgtgttccttcaatagcatcgttatttgccgccactcccggccacgctttcaccgccgcgggtcaggtaataggcaccgagaatcgggaacatcgtcaccagcatcaccagcatcgccaccacattggtcaccggcacgtcgcgtgggcggctcagttggttgagcagccacagcggcaaggtgcgttcgtggccggcggtgaaggtggtgacgatgatttcgtcgaacgacagcgcaaaggcgagcatgccgccagccagcagcgccgagcccaggttgggcatgatgatgtagcggaaggtctgccagccgtcggcgcccaggtccatcgaagcctcgatcaggctgtgggaggtacgacgcaagcgggcgatgacgttgttatagacgatcaccacgcagaacgtcgcgtggccgacgatgatggtgaacatccccggttcgatgcccagcgtcttgaacgtcgccaacagtgcgataccggtgatgatccccggcagcgcaatcggcaggatcaacatcagcgacacgccttgcttgccgaagaactcgcggcgatacagcgccgccgaggccagtgtaccgaggaccatggcgatcagcgtggcgatggcggcgatctgcagcgacagcttgatcgcctccagtacgtccggccgcgcaaacgccacgctgaaccacttcagggtgaagccctggggcggaaagctgaacgcggcttcttcggtgttgaaggcgtagaggaagatgatcaggatcgggaagtgcagaaacaccaacccgccccaggcggcgatcttcaggcctagtgaggatttttcagagtgcatcgaaggcccccaggcgtttgacgatggacaggtaaaccgcgatcagcacgatcggcaccaaggtgaacgctgcagccatgggcatgttgccgatggcgccttgctgggcgtagaccataccgccgacgaagtagccgggcgggccgaccagttgcggcacgatgaaatcgcccagggtcagcgagaaggtgaagatggaaccggcggcaattcctggcaccgacagcggcaaaatcacctgcatgaaggtctggcgcggtttggcgccgaggtcggccgaggcttgcagcagcgagggcggcaagcgttccagggacgcctggatcggcaggatcatgaacggcagccagatgtagacgaacaccatgaagcgccccaggtgcgaggtgctcaaggtactgccgcccacgccggggatgcccagcacgaactgcaacaccggctccaggcccaggtgctgcacgaaccactgcgccacgccgcccttggccaacagcaaggtccaggcataagccttgacgatataactggcccacatcggcatcatcaccgcgatgtagaagaacgccttggtcttgcccgtggtgtagcgtgccatgtagtaggcgatggggaaggccacgatggcgctggcgatcgacaccacgatcgccatgctcaaggtgcgcacgatgatgtcgaagtttgacggctggaacagcgcggcgaagttggccagggtcaggtccggcgtgaccgccatggtgaagtcatcgaaggtgtagaaaccctgccacagcagggtcagcaacgaacccaggtagatcgcgccgaaccagatcagcggcggtatcagcagcatggccaagtacaggttgggcttgcggtacagcaggttggaaaacctgcgcatcggcgggtgggaaatagccaggctcatgtcacacctcgcctgcgctgtcggtcagcggggtcatggcttcgcgcgcccaacgggcggtgatggactggccgacctgatggccgctgctgatgtccagccactggttgttggcctggctgatgttcaacgcctggccgttttccagtttcagctcatagcgggtggcgctgccctggtactggatatcgtggagcaaaccgctgatttccacttcgccggcgcccagcgggccctcggcaaaccgcacgtgttccggacggatcgaaaacggctgcacgctgccgctgaggcgctgggccaactcgccgcgaatcacgttggaggtgccgacgaactcggcgacgaacgcggtggcgggtttcatgtagaggttgcgcggggtgtcgacctgctcgatgcgacctttgttgaatacggccacgcggtcggacatcgacagcgcttcggtctggtcgtgggtcacgaagataaaggtgatgcccaactggcgttgcagctttttcagctcgctttgcatctgctcgcgcagcttgaggtcgagggcgcccagcggttcatccagcagcaacacacgcgggcggttgaccaaggcgcgggccagggccacccgttggcgttggccaccggagagctgcaccggcttgcgctcgccgtagccgccgagggcgaccatggccagggcttcttcggcacggttgaggcgctcggtcttgcccacgcccttgaccttgaggccgtaggcgacgttgtcgcgcacattcatatgggggaacagcgcgtaatcctggaacacggtgttcacatcgcgctggtacggcggcaagccggcggcttcctcgccatggatacggatcgagcctgcgctcggctgctcgaacccggcgatcaggcgcaggcaggtggtcttgcccgagccggaagggccgagcatggaaaagaactcgccgtcctggatatcgatggaaacccggtcaacggctttcacttcgccgaactgacgggaaacgtgggtgaattggactgcaagcgtcatggtgcggtgctccgaaaaggcacgggtcgtcgcagcggcccggcctggacttctgaaaaaacaaaacatctgtgaatgcggtcaatgtgggagggggcttgcccccgatgactgtgcaccagtcgacacaagtgtgtctgatgtaccgctatcgggggcaagccccctcccacaggagacctatgttgtcttggagaccttagcggccgcccatgatcgcaatgtaatcctgggtccagcggctgtacggcacgaacttgccgccctccgcctgcggggttttccagaaggcgatcttgtcgaactgatcgaacccgttggtcttgcagccttcggcgccgagcagttcgcttgcctggcacgccgcaggcacggctggcagcgaaccgaaccaggcggccacgtcaccctggaccttcggttgcagcgaccagtccatccatttgtaggcacagttcgggtgcttggcctcggcgtgcaacatggtggtgtcggcccagccggtggcgccttccttcggaatggtcgaagcaatcggctgtttctcgttctgcaggccgttgacctgatacggccaggcgctggaggccaccacgccttcgttcttgaagtcactcatttgcacggtggtgtcgtgccagtagcggtggatcagcggttgctgggcgcgcagtaattcgagcacggccttgtactgggtttcggtcagttcgtacgggttctggatggccaattccggcttggtcgacttgaggtacagcgccgcgtcggcgatgtagatcgggccgtcgtacgcctgcacgcggcctttgttcggcttaccgtccggcaggttctgcgcgtcgaacagcacattccagctggtgggtgcggtcttgaatacgttggtgttgtacatcaatacgttcgggccccactggtacggcgtgccgtaggtttgctggccaaccacgtaccatggcgcgtctttcaggcgggggtcgatgttcttccagttggggatcagcgcggtattgatcggctgcacgcgcttgccgacgatcagccgcagcgaggcatcgcccgacgcggtcaccaggtcatagccacccttggccatcaggctgaccatttcgtcagaggtggcggcggttttcacgttgaccttgcagccggtttccttctcgaaaccgctgacccagtcgtaggccttgtcgctttcgccgcgttcgatatagccaggccaggcgacgatatccagttggccttcaccggcacccaccgccttgagcggttcggcggcctggaggctggcgctggccagcagcgcggtggtcagggcactgagcagtgcggtcttgtgcgcggacatgggggttccctcttctttaattatggtcggggcagtttttgaaccggtaacgcatgagcttagttgttgttttaaagatgctggccgtggcgcgccatgatgtgccgcaccacgctgtagtcctgcagcgaatcgctggacagatccttgccatatcccgagcgcttcaagccgccgtggggcatttcgctgaccagcatgaaatgactgttgatccaggtgcagccgtattgcaggcgcgaggccacttgcatggccttgtccaggttctgggtccacaccgacgaggccaggccgtattcggagtcgttggcccagtccaccgcctgttccagttcgtcgaagcgcgtcaccgtgacgaccgggccaaacacttcgcgctgcacgatttcatcgttctgtttgcagccggccagcagcgtcggctggtaatagaagcccgcgccggaatgcacggcggcgccggtgatgcgttcgatatgcggctggccgagggcgcgctcgacaaagctggccacgcggtcgcgctggcgtgtgctgatcagcgggccgagttcgttgtcggcgtcgcgcttgctggcaaagcgcaggctgctcacggcggcgccaagctcagcgaccagtttgtcgtggataccggcctgggcgtagatgcggcacgcggcggtgcagtcctggccggcgttgtagtaaccgtaggcgcgcacaccctcgaccacggcttgcaggtcggcgtcgttgcacacgatcaccggcgccttgccgcccagttccaagtgcgtgcgtttcaaggtcttggaggcggcctgcagaatcttctgcccggtgacgatatcgccggtcagcgagaccatgcgcactttggggtggctgaccagatggctgccaacgccttcaccgccgccacacagaatgttgatcacaccgcgtggcaacaactcgttgagcgccggggcgagggcgaggatcgacagcggcgtgtgttccgacggcttgaacaccaacgtattgccggcggcgagggctggggcgattttccacgcggccatcatcagcgggtagttccacggcgcaatcgaggccaccacgccaatcggatcgcggcgcaccatgctggtgtagcccggcaggtattcaccgctgagttgcccggtctggcaacgcacggcgccagcgaaaaagcggaacacatcgacggtggcgctcaaatcatcctgacgcgccaggtgcaacggtttgccgcagttcagcgattccaggcgggccaggtaatcggcttgtctttcgatggcgtcggcaatgcccagcaggatgttcgagcgttgctgcggcgtggtgcgcgaccagccggcaaaggcgcggtgagcggcgaggatcgcggtttccacctgctcggtgctggcttcggcgatctgggtgagcacttcacccgtggccgggttgaggatcggctcggcaaaaccctggccctggaccagttcgccgtcgatcagcaacgcagtaagcagcggggtgggcgcgccggacatttttcgcgatctcttttcttgtgtggccatgggcgttctcttacgagggcctgacctttctcttagggataagcagagactagaggtcaggcgcgaggtcaacaaatactaaatactgaatgcagcattcgattaaatagatggcttgcgcgggtgcggctgttcgcgggcgactgtcaggaatgggtccaccagcgccggacgcgccgtgccacggcgccaggccaggcccacgtcgagggtctggctgaggtcggcaatcggccgcgcttcgataatgtcgccctccagcgaccagggacggtaggtcatgtcgggttggatcgacacgcccaggcctgctgccaccaggctgcgcaccgcttcggtggaggcggtgcgcagggtcacgcgcggttgcaggccggcgctggtccacaggcgctgggcgttgtggcccatttcatcgacgttcagctggatcaacggttcgcgcgctacatcggccaggttgatgctgtcgtgctccagcagcggatgctgtgctggcagccaaagccggtgaggggagtgggtgagcacttcggtctgcagggcgtggcggtcttcgaggttggagaggatcagtacgcccacgtcgatttcaccgctgaccagcaaatgctcgatgtacggccgttcgtcctccatcacgcggatttccacgttggggtaggcgcgctggaagcgggtcagcaagtcggcgaggtagtaacccgccaccaggctggtcacaccgatgatcaactgcccggcgacctggtcggtgctctgctgcaggctgcgcttggcgttgtcgacggtggcgagaatcaagtgcgcctggcgcaggaactgatggccctggtgggtcagggtcatgcccttggcgtgacggttgaacaggttgacgccgatttcctgctccagttgctggatcgccagggtcagagtcgactgggagataaacgccgtctgcgcggcagcggagatcgagccggtctcggccacggcaataaaatgccggatttgacgcaaggtcatcatgctggaattaccagtggggtgtttttatagatttatccgagtgtatatcgatttaagcgaagggcgaccgcgttacatctggaagcactctagatcagggctttttggcacttagttttacgctgggggcctattggtcctatgaacccaagtgtctggaggctgcgaatgaatacccgtggattgctcgatcagttgctcaagtctggccaggacatgctgcaaaacaaggctggcggccagcgtaaacaggacgacaaaggtgcgctgggcggtctgctcggcggtggcggcctgggcagcctgctcgggggcgccggaggcggcgccttggcggcgggggccatgggcctgctgctgggcaacaagaaggcgcgcaaattcggcggcaaggcgctgacctacggcggtttggcagccttgggcgtcatcgcctacaaggcctacggcaactggcaggccaatcaggccagcgccccccagggcgagccacagaccatcgaccgcctaccgccggcccaggtcgagcaacacagccagggcatcctcaaggcgctggtcgcggcggccaaggccgatggccatgtggacgagcgcgagcgtgcgctgatcgaaggcgaattcaccaagctggacaacgatcgcgagctgcaaagctggctgcgcgccgaactcaacaaacccctggacccggccgacgtggcgcgagctgccggcaccccggaaatggcggccgagatgtatatcgccagcgtgatgctggtggatgaggagaacttcatggaaaaggcctaccttgacgagctggcccgccaactgaagcttgagcccggcttgaagctggaactggaaaaacaggtgcggctgaacgcgtaaagacggggcgtgcagcgatcaaaatgtgcgagggggcttgccccccgatagtggtgtttcagtctatttacagttggctggcacaccgccatcggggggcaagccccctcgcacatttgcattctgtggacgcttcatcaaaacccgttgattaatgaggccttctgctcagctatactcccctccatttgaatggccctccgaggaattactgtgaagaactggaccttgcgccaacgcatcctggcaagttttgcggtcattatcgccatcatgctgttaatggttgtggtctcctattcacggttgctgaagatcgaaaccagtgaagtcgcggtgcgcgacgacgcggtgcccggggtctacctcagttccatgatccgcagcgcgtgggtcgacagctacctgcaaaccctggagttgatcggcctgcgtgaagacaagggcctgaccgataccgacaaggccgacttcaagtcctatgaagcgcgcatcctgcagcagatggccaactaccaggcgaccatcagtggcggcgacgaccaggccgagttcgataaattcgaagcccagcaccaggcttacaacaaggcgctggctgccgtcgtagagcgcctgcagaacaacgatttggctggggcgcgcaagctgttcgatacgcagatgacgcccagctgggtcgcaggccgcatgaagctcaacgacatcatcaccgagaacaagaacgtcgccgaccgtgcgaccaacgcgatcgatgatgcagtatccgccgcgaaaatcagcatgtttgtgtcgctggccctggccatcctcgccgccggcctgtgcggcctgctgctgatgcgcgcgatcatggcgccgatgcagcgcatcgtcgatatcctcgaaaccatgcgcgacggcgacctgagcaaacgcttgaacctggagcgcaaggacgagttcggcgcggtcgaaaccggcttcaacgacatgatgaccgagctcacggccctggtgtcccaggcccagcgctcgtcggtgcaggtgaccacctcggtgaccgagattgccgccacctccaagcagcaacaggccaccgccaccgaaacggccgccaccaccaccgagatcggcgccacctcccgcgagatcgcggccacctccaaggacctggtgcgcaccatgaccgaagtgtccaccgccgccgaccaggcctcggttgccgccggttccggccagcaaggcctggcacgcatggaagaaaccatgcactcggtgatgggcgccgccgacctggtcaacgccaagctggcgatcctcaatgagaaggccggcaacatcaaccaggtggtggtgaccatcgtcaaggtcgccgaccagaccaacctgttgtcgctgaatgccgccatcgaagccgagaaggccggtgaatacggccgcggttttgccgtggtcgccaccgaagtacgccgcctcgccgaccagactgccgtggccacctacgacatcgaacagatggtgcgcgagattcagtcggcagtgtcggcgggtgtgatgggcatggacaagttctccgaagaagtgcgccgtggcatgtttgaagtgcagcaagtgggcgagcaactgtcgcagatcatccaccaggtacaggcgctggcgccgcgggtgttgatggtcaatgaaggcatgcaggcccaggccaccggtgccgagcagatcaaccacgccctggtgcaactgggcgatgccagcagccagaccgtcgagtccttgcgccaggccagctttgctatcgatgagctgagccaggtggcggtcggtctgcgcagcggcgtgtcgcgtttcaaagtctgatgagcgacctcgcggctaaacgcggcgccgtcccggcagcgaaaaaggcgttgttcctggtgttccacatcggcaatgaacgttatgccctcaaggccacggaagtggccgaagtattgccgtgcctgccattgaaaccgattgcccatgcaccgctgtgggtggcgggcatctttgcccatcgcggcgcgctggtgccggtgatcgacctcagcgccctgaccttcggcaccgccgcccaggcacgtaccagcacacggctggtgctggtcaattaccagcccgagccctggcgcgagccgcgttggctggggttgatcctcgaacaggccaccgacaccctgcgctgcgacccggcgcagttccagccctatggcctggacaaccgccaggcgccgtacctggggccggtgcgcgaagatgcgctgggcctgatgcaatggatcggcgtgaatgacctgctgaccgaagacgtgcgcgccgtgctgttttgccccgagttgagcctatgagccacgacccgcgtttctttgccttcctgaaagagcgcatcggcctggacgttgcctcggtcggcgaagccattatcgagcgggcggtgcgccaacgcactcaggcggccaacgcgcagacccccggcgaatattggcagcacctgcaaagctccgaggatgaacagcaagcgctgatcgaagcagtgatcgtcccggaaacctggtttttccgttatccagaatcctttgtgaccctggcccgcctggccaaggcgcgcttggccgagatcaagcagatgcgcgcactgcgcatcctcagcctgccgtgctccaccggtgaagaaccttattcgatcgccatggctttgctggatgccgggttggcgccgcatcagttcaaggtgcagggcctggatgtcagcccgttgtcggtggagcgcgcgcggcgtggggtgtatggcaaaaactcctttcgcggcggcgatatcgccttccgtgaccgccatttcaccgaacacagcgacggttatcacattgccgagcgcgtgcgcgaacaggtgcgcctgcaagtcggcaacctgctcgacccgacactgctggccaatgaggcgagctacgatttcgtgttctgccgcaacttgctgatctatttcgaccagccgacccagaaacaagtgttcgacgtgctcaagggcctgacccatgtggacggcgtgctgtttatcggtccggccgagggcagcctgttggggcgccatggcatgcgttcgattggtgtgccgcagtcgtttgcgttcagtcggcatgccgagccggtcaagcccgaaccggtgtttgtgcccgtgcctgcaccggtgccacagcgcagtgccgcaccgatcccggtcaagccgaggccgttcagcggtggcagtgcccaggtagtgccgatcaaggcaccgcacaccgatgcgggcgacttgctgagccgcatcgccaccctggccaacgaaggcaaaagcgctgacgcccgtgctgcatgcgaacagtatttgagtaaccatccgccggccgcccaggtgttctactggctggggttgctcagcgacgtggccggcagtgccctggaagcccagggttattatcgaaaagccttgtacctggaaccccagcacccgcaggctttgatgcacctggccgcgttgctcgaatcccagggcgacagtgcgggggcgcgccgcttgcaggcgcgggccgcgcgcagtgagcgagctgacagtgagtccaaacgatgagtaacaccgacgcgctcgataccgcagggctggacctgaccttggccgacacccaggccatcgacgattgctggaaccgcatcggcatccacggcgacaagtcctgcccgctgctggcggaccatattcactgccgtaactgctcggtgtactcggcagcggccacacgtttgctggaccgctacgccttgcagcaggacgcgcatcgcccgcatgccgtcgtggaactgggcgaagacgtggtcacccgctccctgctgatgttccgcctcggtgaggaatggctgggcatcgccacccgctgcctggtggaagtcgcgccgctgcaaccgattcactcgctgccgcaccaacgttcccgcgccttgctcggcgtggccaatgtccgtggtgcgctggtggcgtgcctgtcgctggtggaactgctgggcctggatgccaccagtaacggcgccagcggtgggcgcatcatgccgcgcatgttgatcatcgccgcgcaggatggcccggtggtggtgccggtggatgaagtcgacggcatccatgccatcgatgagcgcaccttgaaggccgcctcggtctcgggcacccaggccagtgcgcgctacacccaaggcgtgttgcagtggaaaggccgcagcttgcgttggctggacgaggcgcaattgttgtctgccgtgacccggagcctcacatgacccccgaccagatgcgcgatgcctcgctgctggaactgttcagcctggaagccgacgcccagacccaggtattgagcgcgggcctgctggccctggaacgcaacccgacccaggccgaccagctcgaagcgtgcatgcgcgcggcgcactcgctcaaaggcgcggcgcgcattgttggagtggacgccggggtcagtgtgtcccacgtcatggaggattgcctggtcagtgcccaggaaagccgcctgtatttgcaacccgaacatattgatgcgctgttgcaaggcaccgacctgctgatgcgcatcgccacgccgggcaatgatgtggggccggcggatatcgaagcctatgtggcgttgatggagcgtttgctcgacccgtcccaggcgcctgtcaaagcggcgcctgcgccagaaccggcacctatcgtcgaagcgccgctgccggagcccgaacccgagcttgcgctgccgatggtcgccgagccgccacgccagaacaaacgcatgaccgaaggcggcgagcgcgtactgcgggtgaccgccgagcgcttgaacagcctgctggacctgtcgagcaaatccctggtggaaacccagcggctcaaaccgtatctggccagcctgcaacgcctcaagcgcattcagagccagagcgtgcgcgcgctggataccctggacgggcaactcaagactcaacatctgcccctcgaagcccaggaagccctggccgacacccgccgcctgctcagcgaagcccaggccctgctggcggaaaaaaccgccgagctggacgagttcggctggcaggccggccagcgtgcgcaagtgctgtatgacaccgcgctggcctgtcgcatgcgcccatttgccgatgtgctggccgggcaagtgcgcatggtgcgcgacctcggtcgcagcctcggtaagcaagtgcgcctggagatcgaaggcgaaaagacccaggtcgaccgcgacgtgctggaaaagcttgaagcaccgctcactcatttattgcgcaacgctgtcgaccacggcatcgaaatgcctgagcaacgcctgttggcgggcaagccggcagaaggcgtgatctgcctgcgtgcctcccatcaagccgggttgctggtgctggaattgagcgatgacggcaatggcgtcgacctggagcgcctgcgcggtaccatcgtcgaccggcacctgtcgccgctggaaaccgccctgcgcctgagtgaagaagagctgctgacattcctgttcctgccggggttcagcctgcgcgacaaggtcaccgaagtgtccgggcgcggcgtcggcctggatgcggtgcagcatatggttcgccaactgcgcggtgcggtggtgctggagcagacggcggggcagggcagccgtttccacctggaagtgccgctgaccctgtcggtggtgcgcagcctggtggtggaagtcggcgaagaagcctacgcgttcccgctggcccatatcgaacgcatgtgcgacctggcgcccgacgacatcgtgcaactggagggtcgccagcatttctggcacgagggccggcatgtcgggctggtcgccgccagccagttgttgcaacgcccggcgggacagagtcagtcggacaccctgaaagtggtggtgatccgcgagcgtgatgcggtgtacgggattgccgtggagcgctttatcggcgagcgtacgctggtggtgctgccgctggatgatcgcctgggcaaggtccaggatatttctgccggtgccttgctggacgacggctcggtggtgttgatcgtcgacgtcgaagatatgctgcgttcggtggacaagttgctcaacaccggccgattggaacgcattgcccggcgcagccagcaaaccaccgaggcaccgcgcaagcgggtgctggtggtggatgactcgctgaccgtgcgcgaactgcaacgcaaattgctgctgaatcgtggttatgaagtggccgtggcggtcgatggcatggacggctggaacgccttgcgctccgaagactttgacctgttgatcactgatattgatatgcctcgtatggacggtattgaattggtcacactcttgcgccgtgacagtcgcctgcaatcgttgccggtgatggtggtgtcgtacaaggatcgcgaagaagaccgacgtcgtggactggacgccggcgccgactattatttagccaaagccagtttccacgatgacgccctgctggacgccgtagtggaactgatcggaggcgcgcgggcatgaggattgcgatcgtcaatgacatgcccctggcggtagaggccttgcgccgcgccttgagtttcgagcccgcgcacgaagtggtgtgggtggccagcaatggtcttgaagcggtgcaacgctgtgcagaactgaccccggacctgatcctgatggacctgatcatgccggtgatggatggcgtggaggctacccgccagatcatggccgagaccccgtgcgccatcgtcatcgtgaccgtcgaccgccaggccaacgtcagtcgggtgttcgaagccatgggtcatggcgccctggacgtggtggacacgccgaccctaggcgtgggcaaccccaaggatgcagcggcgccgctgctgcgcaagatcctcaatatcggctggctgatcggccagcgtggcagccgtgtacgcgccgaaaccgtcgcgccgcgcatgaccggcaagcgccagagcctggtggccatcgggtcttcggcgggtggcccggctgccctggaaatcctgctcaagggcttgccccgggactttcccgccgccatcgtgctggtgcagcatgtggaccaggtgttcgccgctggcatggccgaatggctgagcagtgcctccggcctgccggtacgcctggcccgtgaaggcgagccgccgcaaagcggcgtggtcctgctggccggcaccaaccaccacattcgtttactgaagaatggcacgctagcctataccgcagagccggtgaacgagatttaccggccgtcgatcgacgtgtttttcgaaagcgtggccagccactggaatggcgatgccgttggcgtactgctgactggcatggggcgcgacggggcccagggcctcaaattgctgcgtgaacaaggttatttgaccatcgcccaggatcagcacagctcggcggtgtacggcatgcccaaagcggcggcggcgattgatgctgctgttgaaattcgcccactggacaggattgcgccccgattgctggaggtctttgccagatgaacaaggcctctcgcggtgctggcttgcaggtagtaattcaggtgactgcacatgaatgatttacagatcgacgacatcaagaccgacgaaaatgccgccatggtgttgctggtcgacgaccaggccatgatcggcgaagccgtgcggcgtggcttggcccatgaagaaaacatcgacttccacttctgcgccgatccgcaccaggcgattgcccaggcgatccgcatcaagccgaccgttatcctgcaagacctggttatgcccggcctcgacggcctgaccctggtgcgcgaataccgcaaccacccggccacgcagaacatcccgatcatcgtgctttcgaccaaggaagatccgctgatcaagagtgcggcgttttcggcgggggccaatgattacctggtcaagctgccggataacatcgagctggtggcgcgcattcgctatcactcgcgttcgtacatgaccttgttgcaacgggatgccgcctatcgtgcgttgcgggtcagccaacaacaactgttggacaccaacctggtgctgcaacggctgatgaactccgatggcctgaccgggttgtccaaccgtcgtcactttgatgaatacctggagctggaatggcggcgtgccatgcgtgaccagactcagttgtcgttgttgatgattgatgtggatttcttcaagacctacaacgatagttttgggcatgttgaaggtgacgaggcgttgcgcaaggttgcggcgaccatccgtgaggccagcagtcggccatcggatttgccggcgcgctatggcggtgaggagtttgccctggtgctgcctaatacctcgccgggtggggcgcggttggtggctgagaagctgcgcatggcggttgctgcgttgaagattccgcacattgcgccgaccgagggggccagccttacgattagcattggtctgtccacgatgacgccgcagcaggggacggattgtcggcaggtgattgtggcggcggacaaggggttgtatacggccaagcataatgggcgcaatcaggtcggtatcgagtgacctgaagtcttaccccattcaatgtgggaggggggcttgcccccgatagctgtgggtcagtcacaacatcattgactgacaggccgccatcgggggcaagccccctcccacattgggatcttgatgggtcttgggttgtgtacaaatcctgccttttcgcccagcggactgccgctcccccccatttgccgttatactcgccggctttcaaaagttcgccaacgagtgctgcccgccatggaaatcaacccgatccttaacaccatcaaggacctgtccgagcgctccgaaactattcgggggtatctttgactacgatcaaaagcatgagcgtctgaccgaagtcaatcgcgagcttgaagatcctgctgtctggaacaaacctgaatacgcccaggaactgggccgcgagcgcgctgcgctggcgcagatcgtcgataccttagacgagctgaacaccggtctggccgattgccgtgacctgctggacatggccgtcgaagaaaacgacgaaggcgcagtgggcgatgtcgtcgccgagctggcccgtctcgaggaaaacctcgccaagctcgaattccgccgcatgttcagccatgaaatggacccgaacaacgcctacctggacatccaggccggttccggtggcaccgaggcacaggactgggccaacatcctgctgcgcatgtacctgcgttgggcggacaagcgcggtttcgaagcgacgatcatggaactgtccgccggtgaagtcgccgggatcaagggcgcgaccgtgcacatcaagggtgagtacgcctttggctggctgcgtaccgaaatcggcgtgcaccgcctggtgcgcaagagcccgttcgactccggcaaccgtcgccacacctcgttctccgctgttttcgtctcgccagagatcgacgacaaggtggaaatcgagatcaacccggccgacctgcgcatcgacacctaccgctcctccggtgccggtggccagcacgtaaacaccaccgactcggccgtacgtattacccacgtaccgaccaacaccgtggtcagctgccagaacgaacgttcccagcacgccaacaaggacaccgccatgaaaatgctgcgggccaagttgtatgagcaggaaatgcagaagcgcaacgccgcttcccaggcgctggaagacaccaagtcggatatcggctggggtcaccagatccgctcttatgtgctcgatgcgtcgcggatcaaggatctgcgcactaacatcgaacgcagcgactgtgacaaggtgctcgacggcgatatcgacgaatacctggaagccagcctgaaatcgggcctctaaagaaccttgtaggagcgggcttgcccgcgatccccagccgaaggctggggaaaacgtatctgtgatggaatttcaaaagacatgagcgaccaacaactcgacccgcaagccctgcaacaggaagaaaactccctgatcgccctgcgcaaggaaaagcttgctgccgagcgcgccaagggcaatgccttccccaacgacttccgccgcgaaaactactgcgatgccttgcagaagcagtacgcggacaagaccaaggaagagctggcagaggctgcgatcccggtcaaggtggcaggtcgcatcatgctcaaccgtggctcgttcatggtgatccaggacatgaccgggcgtatccaggtctacgtcaaccgcaagaccttgtcggaagaaaccctggcctcggtgaaaacctgggacatgggcgacatcatcgccgccgaaggcaccctggcccgttcaggcaagggcgacctgtacgtggaaatgaccagcgtacgcctgctgaccaagtcgctgcgcccactgccggacaagcaccacggcctgaccgacaccgaacagcgctaccgccagcgctacgttgacctgatcgtcaacgaagaggtgcgccagaccttccgcgtgcgttcgcaagtgatcgcacacatccgcagcttcctgatgaagcgcgacttcctcgaagtcgaaacgccgatgctgcagaccattcctggcggtgccgctgccaagccgttcgaaacccaccacaacgccctggacatggaaatgttcctgcgtatcgcgcccgagctgtacctcaagcgcctggtggttggcggcttcgaaaaagtcttcgagatcaaccgcaacttccgtaacgaaggcgtttcgacccgtcacaaccctgaattcaccatgttggagttctaccaggcctacgccgactacgaagacaacatggacctgaccgaagaactgttccgcgaactggcgcagctggtcctgggcagcaccgacgtgccgtacggcgacaaggtgttccacttcggcgagccgttcgtgcgcctgtcggtgttcgattcgatcctcaagtacaaccctgagctgactgccgacgacctgaacgacatcgacaaggcccgtgccatcgccaagaaagccggcgccaaggtgctgggcttcgaaggcctgggcaaattgcaggtgatgattttcgaagagttggtggagcacaagctggaacagccgcacttcattacccagtacccgttcgaagtgtcgccgctggcccgtcgcaacgacgacaacccgaacgtcactgaccgtttcgagctgttcatcggcggccgtgaaatcgccaacgcctactccgagttgaacgacgcggaagaccaggccgagcgcttcatggcccaggtggccgacaaggacgctggcgacgacgaggccatgcactacgacgccgacttcgtccgcgccctggagtacggcatgccgccgaccgccggtgaagggatcggcatcgaccgcttggtgatgctgttgaccaactcgccatcgatccgcgacgtgatcttgttcccgcacatgcggccacaagcgtaaccgtagcgaaatccgaagccgccttttataaggcggcttttttatgtggcgttaataagcgtcaagcaaacagcgccaggagatcgttcccacgctcggcgtggtaacgcataccgtgacgctctgcgtcacctaataaggaaatctgtcgtgaaccgcgtaaccgctcaagaaggcgccgccggcattgccgctgccgtggctgaaagcgtccagtaccagggccgcaaggccagtcgtcggggcagcgagcaacgcaggcaggacattctcgatgcggccatgcgcatcgtcgtgcgtgacggcgtgcgcgccgtgcgccatcgagcggtggcagcggaggcgggcgtgcccctgtcggctaccacctattacttcaaggacatcgatgatctgctcaccgataccttcgcccaatacgtcgaacgcagcgccgcgttcatgggcaagctgtgggtgcgtaacgaaggcttgctgcgcgaaatggtcgcctatggggatggcagccccgaatcacgctcacagttggccgatgatattgcacggctgaccgctgattacgtcttgcgccaattgaccaaccgccgtgagcacttgatggctgagcaggcgtttcgccaggaagccttgctcaacccgcgcctggcggagttggtgcgttcccatcaacagattctgttgcagggcaccgggcagttcttccaggtgctgggctcgcgcgagccgcaacaggatgccaaagtgttgacggcgataatcagtcggatggaatatcagggcctgctgggcagtgcagagcctctgaccggtgaagagatgcttgaaatcctcaagcgctatatgcatttggtgttggcctcggtctgacaccgggggatgcccaatgaaagcctggcgtgtggttgcaatcgccttgtcgttcctgctgctcagcggttgcctggtgaccttcaaggacccgctgccggcccatgacgccgcgccgccagccctgctgggccagtgggcgagcaaaaacgcctggggcgagccgctcaacctgcatatcagcgccgtcggtgaacaccgctataaagccgtgagctaccctacagccaagcccggccagcgtgacgaataccggtttaccgtttcgcgccatggcagccgctggtatttgtcggcgccgctgccggccaagctcggtgggcatttcatcctggcggggtttgagatcaacgaaaagcacgaattggtggtctacaccctcgaccttgagcagatccaccaagcgatagaccaacaggcgttgcacggcagcaccgtggacacggtcgagggcgccggggtgctggtcgacagccccttggaccaagtgtttgcgtacctggatgacccggccaatgccgatgtattcgtggaagccgtgcgctaccagcgcgcgggccaataacgtttaaagaggaagcaccgggtggacgattaccagcagacgatacgcaccttgtctgatcgcattgtgctggcgcaaacaccgattcgcgtcctcgacgccgtgaagtgggacgagaatattcgccaggggttcctcaaggccaagggcaaggaaatgccggcggtgagccgtgactattacctcaatcgaccgctgtcgttcgactccagcgcggtgaagctggagttccagaacatcgagcgcgacatcacccgtcgcctcggccagttcagcccggtggggcagatcatgcgccgcatgtgcaaggagtaccgcatggtggtgcgcatgctcgaagcgcgtggtaccgaggatttcggcctgatctcccaagaattgtacggcgctgcctccgatgcgtttcacgccggcgatccgaccctggctgacctggggctgatgctgtccgattatctgaacaatatagacggccgaggcgacttgaaggacgaggccaagaccctcaccgccaaggatgccgtcgccctgctgcaaacccgcctgaacaaggtatttggcgaggccgaagagaccatccgcgtgttcgagtccgacggtattgtcgctgacgccgcagcgggcgccgactacatcaagatccgcgccgacgcgatgttcaacgaccgcgacgtgcgcgccctggaagtgcatgaaggcctggtgcatgtgggcactaccctcaatggccagaaccagccgatctgcaccttcctgtccaaggggccgccctcgtccaccgtgacccaggaaggcctggcgattttgatggagatcatcaccttcgcctcctacccgagtcgcctgcgcaagctgaccaaccgcacccgtgccattcatatggtggaagagggcgccgacttcctgcaggtgttcgagttctttcgcgagcaaggcttcgagatggctgaaagctacggcaacgccagtcgtgttttccgtggttcggtgccgaccggtctgccgttcaccaaggacctgtcctacctcaaaggctttatcatggtctacaactacatccagctggccgtgcgcaaaggcaagctggaacaagtgccgctgctgttctgcggcaagaccaccctggaagacatgcgcaccctgcgccaactggtcgatgaaggcctggtggtgccgcccaagtacctgccagagcaattccgcgacatgaacgcgctggcggcctggatgtgcttctccaacttcctcaaccacctgagcctggatcggatcgaggcggattactccaatatcctttaaaccgtgctattcgcgaggcttcaacggatgagaatcctcggcattctgtgcctgctactcacattgaacggctgcagttccctgctgttctaccccgagcccggcctgccgttcacgccggaaaaagctcatcttcaataccgtgacgtcaccctcaccactgccgacggtgtaaagctcaacgcctggtggctaccggccaaacccggcgtgccactcaaggggacggtgctgcacctgcatggcaacggcggcaacctggcctggcatctgggcggcagctggtggttgcccgagcagggctaccaagtgctgttggtggactatcgcggttatggcttgtcggaggggaagccgtcattaccggcgatctatcaggatgtggacgcggcgttccaatggatcgacaaggcgcccgaaacccagggccagccgttgatagtgctgggtcagagcctgggcggcgcattggcggtgcactacctggccgcccacccggagcgccaatcgcggctcaaggcgctggtgctggacggcgtgcccgccagttatcgtgacgtaggacaattcgccctgagcacctcctggttaacatggccgtttcaggtgccgttgtcctggctggtcccggacgccgacagtgccatccatgccatgccccagctgacaggtgtacccaagctgctgttccacagcctggatgacccgatcgtgccggtgaccaacgggatccgcctgtaccaggccgcaccgccacccagggtgttacagctgacccgaggcggccatgtgcagacctttgccgacaagacctggcaaaccgtgatgctgcgttacctggatgaccctcagcacttcaatggactgcgccgcctgggcgaaatcccgaattacccgattcctaacgttgactcatcagagagcccgcaatgagcgaagaacgcaacatgatcccgctgatcctcaccggtatcggcaccatcatcggtactgtcggttgcctgtggtactacggctacctgcacttcgccaagccggaagatgcgttgttgctcagcgacttcaccatgctcaagaccgtgcccggcgaggactacaagatctccctgacgccagccgcccaagtggcgcaatgcgtggatggtgtactggtgatgttcgacactgagcagaaaggcctgagcggtgtgctggtgaataacaagaagcaggccgtgcgatgcatggggcaggaaacaccacaactccagcagtaagccggatgtaccgcgcctgaaatatctggaaccgttttgcgtaacagaccactcattggcgtgtcagcgttcatggtgagatttgcgaaccgccagccaggggagtgtcatggtcaagttgggtgagataagtgcgatagacaggtggttggagatgtccaggatgcaggagctcgttgaagcgctccgtggaggcgtcgacgataccgcgcaaaaggagcagggggagcagtgccaagagaaaccaggctatgcaggtttcgagagcgacaagtgtccaatcaaattctaagtgtaaaaaaacccaccgtttctggtgggttttttctatccaaacaatcagttagcgacggacgaccgtggcttgaccggctggttgtcattggagatggttacttcgacgcgacggttcatggcacgaccagatacgctaccgttatcggcaaccgggtattccttgccatagccctgggtcacgatgcgcgagatatccacgccctgttgtgccagtgcacgttgtacggaggctgcacgacgctcggacaggctctggttgtacgaatcggaaccggtgctgtcggtgtagccttcgacgatcaccttacggtccgggttatcgcgcaggaactgcgccagcttggtgatgttcaccaggccgctggatttcaggtcggacttgttggtggcaaacagcacgtcaccgaaggtcaccagggtgccgcgatcagtctgcttggcgttcaagctgtcctgcagttgcttgatctgcgcatcacgggcgtcgagcagggcgcgggcgcgttcgtcaccggcgtttttcagcttggcttcggattcgcgcagcacgatggtgtctttggctacttcaacgcgctggttggtcaggtaggccagttggtcgaccttcttctgatcttccttgtcgcggtatgccttgtcagccttgtccagccaatcgctggcgtctttggtttccagcgccgcgagcttggtggcctgcgggttggtctgcagggacgagaagttggtccgtgcgttttccaggttcgcgttaggcggggtggagcaggccgccagggcaacgctcatcgccagcagggcagggatcatcaattgtttacgcatagtcgtgtcgtcctttcaattcgatatcgggtgcaatgcaatcaggggcggcttatttctgctggatagcagccgggcgcatgccttcctgacgcagctcctgaacagctttctgggagtccttcacagcctgttcggccttagcggcctgggatttacgctcagcgacacgagcgtcccactcggcttgttcggccaggcgacgggcttcgtcgtagttcttgtcgtgcatggcaatctcggcttgcttgagcttgtcctgagccgacttcatttctaccgctgcgtactcggtgccgccggcgctgacagcgctgttcaccgcagattgggtcacggcgtactgctcggtcggagggttgccggcgcagcccgccagaacgaagctggtgccgattgccagcgcggccaatttgagcccgcgcaggtggttaaacgaggatttggcagtgctggtcttcatcgtcttcaactccattggataactcctgaaaaacatcaaaatccatgtcactggtctgcggctgggggcttggtactcacgcacaaattgccctttaaaacggccgttccaagtgatggcttactggctgtgaccggaggcttttttcaaaagttcagagaagatggcgatttgcctaaaaaaatatctgactgtttggtcagcgaaaaaacttggaacttctgcgttgcgcagcggtacgccgggctcctaaagagcccggaatacagggggtttgcgctagggtttcagtgtttcggtttgtcgccactcgctgataagtcatgcagatagcgacgcgacagcgtcagaaagcgcggagtagggccgacatcttcatagagcgggtcgccctcttcatcggtggcgatcacctgctgccccttgatgtatggaaagctggcttccagctcttccagtgcggcgccgatcagttcgccgagcagttcttcggtgctgcgcttggggtacatctcggcgatcgctgccaggcgtgccgcagcttccacatccagatggatggcgtactcggtcttggtcaggcgacccttggcattctcttcccagtgctgggccagttctcggattttcatggcaacctcaataaagctcgcgatagcaggcggtgatgagtgacccgccgtccgcgtggataaacgcggcgacttagtgttgagactagctgcaactcacaaggtttaaagtcttgtcataaatgagcgctggcggcactctggcaaacctgcgcgtcccggatttctggctggagattggctgatgagtgatatcgatgcacgcttgcgtgaggatgttcacctgctgggtgaactgttgggcaacaccattcgagagcagtatggcgacgatttcctcgacaagatcgagcagatccgcaagggcgccaaggccgaccgccgtggcgcaggcgatgaactgagcaccagcctcaaccagttgcaggaagatgaactgctgccggtggcccgtgctttcaaccagttccttaacctggccaacattgccgaacagtatcagctgattcatcgacgcgatgagtcgcaaccggcacccttcgagtcccgtgttttgcctgagttgctggcgcggctgcaagccgaaggccacagcaacgaatccctggcccggcaattggggcgcctggagattgagctggtcctcaccgcccaccccaccgaagtggcgcgccgcaccctgatccagaagtacgacgccatcgccgcccaactggcgctgcaggatcatcgcgacctcaccacggccgagcgcgagcagatccgccaacgcctgcaacgcttgatcgccgaggcctggcacaccgaagaaatccgccgcacccggcccacgccggtagacgaagccaagtggggctttgcggtcatcgagcattcgctgtggcacgcgattcccaattacctgcgcaaggccgaccaggccctgcacgctgccaccggcctgcgcttgccgctggaggcggcgccgatccgctttgcgtcgtggatgggcggcgaccgtgacggcaacccgaatgtcactgcaccggtcacccgcgaagtcttgctgctggcgcgctggatggctgccgatctgtacctgcgcgatatcgatcacctggcctccgagctgtcgatgcagcgcgccagcccggcgttgcaggccaaggtcggcgatagcgtcgaaccctatcgcgccttgctcaagcaattgcgtgaacgcctgcgtgccacgcgccaatgggcgcatacggcgttgagcagtagcacgccggcacctgccgaggtgttgcagaacaaccgcgatctgctcgaaccgctggagttgtgctaccagtcgctgcacgaatgcggcatgggcgtgatcgctgatgggccgttgctcgactgcctgcggcgggcggtgactttcggcctgttcctggtgcggttggatgtgcgccaggattccagccgccattgcgcggccatgaccgaaatcaccgattatctcggtctgggtcgttacgaagactggaacgaagagatgcgcatcagcttcctgatgaaggagctggccaaccgtcgaccgttactgccgggttatttcaaaccgtcggcggataccgccgaagtgcttaacacctgcaaggaagtcgccgccgcccccgctgcgtcgttgggctcgtatgtcatctccatggccggcgctgcgtcggatgtgctggcagtgcaactgctgcttaaagagtcgggcgtgcaacggccgatgcgtgtggtgccgctgtttgaaaccctggccgacctggataacgcaggcccggtgatcgagcaactgttgctgctgccgggttaccgcgcgcggctgcaaggcccgcaggaagtgatgatcggctactcggactcggccaaggacgccggcaccaccgccgctgcctgggcgcagtaccgggcgcaggaacgcctggtggatatctgccgtgaacagcaagtggaactgctgttgttccacggccgtggtggcaccgttggccgtggcggcggcccggcccacgcggcgatcctgtcgcagccaccggggtcggtggcgggacgcttccgtaccaccgaacagggcgagatgatccgcttcaagttcggcctgccggatattgccgagcagaacctcaacctttacctggccgctgtgttggaggcgaccctgttgccaccgccgccgcctgaaccggcctggcgccatttgatggacgaattggcggcagacggggtcagcgcttatcgcgccgtggtgcgcgagaatccgcagttcgttgagtatttccgccaatccacgccggagcaggaattgggccgcttgccgttgggcagccgcccggccaagcgccgagcgggcgggattgaaagcctgcgtgcgattccgtggatcttcggctggacccagacccgcctcatgctgcccgcctggctgggttgggaagcggcgctgagcaaggccctggaacgtggcgaaggcgacttgctggggcagatgcgtgagcagtggccgttcttccgcacccgcatcgacatgctggaaatggtgctggccaaggccgatgccgatatcgcccgcctgtatgacgagcgtctggtgcagccggacctgttgccactgggtgcgcatttgcgcgacctattgtcgcaggcctgcaaggtggtgcttggcctgactggccagtcgcagctgctggcccatagcccggacaccctggagttcatccgcctgcgcaatacctacctcgacccgctgcacctgttgcaggccgagttgctggcgcgctcgcgccagcaggaagcggcacaggacagccctctggaacaggcgctgctggtctccgtggccggtattgccgccggtttgcgtaacaccggctaaggttttttgcgtgttctcaacggcttgcagataaaccacggcggccgccctgaaacgggcggccgccgattgtgcggccaggttgcacccaggcgcaccctacctatgacgtataggcagcacgggttcctgcgacttttggcggcttgtgtgcttaaggcctgctgtgtatcttgatcagcctttggccgtttgggcggcccgaattctatttttacgcgattggcccgccgcggcgaatccgagcgtcatctctataaaaaattgaggagcacatcaatgcgcgtcattctgctgggagctcccggggccggtaaaggtactcaggcaaagttcatcactgaaaaattcggcattccacaaatctccaccggcgacatgctgcgtgcggccgtcaaggccggcaccgagctgggcctgatcgccaagagcgtgatggacagcggtggcctggtttccgatgacttgatcatcaacctggtcaaggaacgcatcagccaggaagactgcaagaacggtttcctgttcgacggcttcccgcgcaccattccccaggctgaagccctggtgaaggcgggcgtcgagctggatgccgtggtcgaaatcgcggttgaagacgaagaaatcgtccagcgtattgccggtcgtcgcgtccacgaagcctcgggccgcgtgtaccacaccgtctacaacccgccgaaggttgaaggcaaggacgacgtcaccggtgaagacctggtgcagcgcaaggacgacaccgaagaaaccgtgcgtcatcgcctgtcggtctaccactcccagaccaagccgctggtggacttctatcagaagctgtccgccgcccagggcaagccgaagtacagccacattcctggcgtcggctcggttgaagcgatcaccgccaaagtgctgcaagcactgagctgatcccgcgaccggcttcacggataacggcccgcttgcgggccgttgttgtttatactggcgcactttttttcgacttggacacctacaccgatgagcaccctgctggccctggacaccgcgactgaagcttgctccgttgccttgctgcacgatggcaaggtaacgagccactacgaggtgatcccgcgcctgcatgcgcagaagctgttgccgatgatcaagcaactgttggaagacgccggcaccacgctggctgcggtcgatgccatcgccttcggccgcggcccgggtgcattcacgggggtacgtatcgccatcggcgtggtgcagggcctggcgtttgcgctggagcgtccggtgttgccggtgtccaacctggccgtgctggcccagcgcgccttgcgtgaacatggcgtccggcaggtggcggccgctatcgatgcgcgcatggatgaagtgtattggggttgctaccgcgaaacggcgggcgagatgcgtctggtcggtgtggaagccgtgcagccgccggagtcatcgcaattgcctgccgacgccagcggcgattggtttggtgctggcaccggctgggggtatggcgagcgcatcgctgtgccgctggtgggccaggacgcgacgatgttgcctcacgccgaggacttgctgacattggcacgttttgcgttcgagcgtggcgaggccatcccggcggaccaggcggcgccagtctatctgcgcgataaagtggcgcagaccaaggcagagcgcgggattatttgacgccaaaaatgatggcaatttggggctaaattcaccaatcgtcagaatttgcccctggttttaaacctttttcaaattatgtgttctagttatcaccagagcatttgcgcgctacggattgcgccactaaaatgccattactgatagcgagttcgcgcccatgcgtattgatggcttttcctcacagtcttacccaatcaagcgcaagccgcgtaaggcgaacgtcacggtggacgactccgtcgaggactcgccggacttcatcgaagtccaagccgatgcacaggccagcgcccaagcgcgtatcagcggtcttcccgctcgtcagcaagacatggtcttcccgcgctccatgagcaaaagcgtcgctaccgccctggccagctacctgaccaccgccggctttgtcgaatgggatatggaagtgctgggcctcgacatccacatctgatgcgtctgccttactacctcggttgcccgtcctggagtgaaaacgcctggcgtgaatacctgtatcccgccgatgcccgttccagcgactacctcgcgctctattcccaggtcttcaacgccgtcgaaggcaacaccacgttttatgcccgcccctcagccgccaccgtgcagcgctgggccgaaatcatgcccgacgacttccgcttcacggccaaatttcccggtgacatcagccacagcggtaacctgaccgagcagctaccggcagcggaaagcttcgtgggcctgatgagtccgttgggtgagcgggtatcgccactgtggttgcaactgcccgcgtcgttcaccccgcagcgcctgggggagttggcgggtttcatcgatggcctggagcggccgatggcggtggaagtgcgccacctggaatttttcgccaagggggacgccgagcgcatgcttaaccgtttgttgcgtgaccgcggcgtggagcgcatctgcctggatccgcgcgcgctgttcagttgcacgtccacctcggccgccgtgctgcacgcccaatctaaaaagcccaaggtgccaccccgtccggcggcgctgacgcagtttccccaggtgcgctttatcggccatcccgaactggaggccaacgatccgttcctgaagccatgggtggaaaaagtcgctggctgggtcgaagaagggcgcaccccctacgtgttcctgcacacctcggataaccgcctcgccgcgcaactggccctgcgtttccacgatcaactgatggcacgcctgccaggcctgccgcccttgcaggtgttggatcgcgctcccgccgtggagcaactggggttactctagggttcctttttccgccaggagcccgacatggatgcccaaacccttcgcgccgaaaccttcaaggccttgcatgagcgcgaccgtgcgttcgtgatgcctaacccgtgggacgtaggctccgcggtgatgctggccagcctgggtttcgaagcactggccaccaccagtgcgggttacgcgttcagccttgggcgcccggatgcggaaggcgcgttgtccctggacgacacgttggtcaatgccggcatgatcgccaaggctaccgcgttgccggtggctgccgacctggaaaacggcttcagcgacacacctgaaggctgtgcccagaccatcctgcgtgctgcgcaagtcggcattgtcggcggctccatcgaggacgccacgggcattgccgccgacccgatctatccctttgacctgtccgtcgagcgcgtggaagccgccgtcgccgccgcccgcagtctgccatttcccttcaccctgacggcccgtgcggaaaacctcctgcatggccgcctggatttgcccgacaccatccgccgcctgcaagcctacgccgaagccggggccgacgtactgtatgccccggccctgcgcagtgccgaggaagtgctggcggtggtcaaggcggtggcgcccaaaccggtgaatgtgttgatgtccggtggcttgaacctgagtgtcgcgcagttgagcgagatgggcgtgcggcggatcagcgtcggctcggcgctggcgttggcggcctacggcgagttctaccgcgccgcgcaggaggtgtatgagttgggcacgtttaccttcaccgagcgcaagatgccgttcagccaggccaaccaattcttcaagggctaagcggtgcgttttttcaaagtgctgggcctgctgctgatcctggcgggtgccgttgccgtgggtgtctggcgtggatgggtgccactaccggccgattggaacccgtgggcaccgctggacgtacgcgccaaccccaacttcttgactcgctacaagctgggccgtctacagggtgacccggcactgtgcgaccgggtgctgcaaacctcgggcctgcgcgtcagtcatcaggcggactcgccggcagatggcgcttgccccttgcgcaataccttgcgcgtacagggttctgcggttgggctgagcagtagctttctcgccagttgcccactggcggtggcgttcgccctgtttgagcggcacagcttgcaaccggcggcccaggcggtattcggccaggcagtgacgcgggtcgatcacctgggcagctttgcctgtcgcaatatctataaccgtgccgaagggcgactcagccagcatgcgtcagccaacgcgctggacattgccggttttcgcctggcggatgggcgcagtatcagcgtgctcaaggactggcctggggagggcgataaggcacggtttctgcgtcaggttcgcgatagcgcctgtgatgatttcaatgtagtgctcagccctgaccacaacgccgcgcaccgcaaccatttccatctggatatggggcgttggtgggtgtgtcgctgaggctcaggcggccaagcgcaggttctgggtgaccagtgggcgagcccagtagtagtcgaagtccagggctttttgttgcgcgaccagttcttcggttggatacggcgtggcggcgggtggcagcaggtccagttcgaattcggcgatgggcaggtgcagagggcgcggctcaggggctggacccggctccggcagcggctggccggccgttaacacgatggggcggacccagccgctttcgaaattctgctggcgttgctgggcgacgatttcttcttccgggaacggtgtggcggcgggtggcaacagctcggtttcgaactcggcaatcggcaggaacagcggctccggtggagcaatctcggtgtctttcacatcgcactcacgctgggtgaggatctgcgacaacaggtcggcgccggcgctgggttctaccgctgggtccgccggtgctggcgcctgcacggcgagcgcgtcgggcgtctcgccaagctgctcggccaaggccctggcgaagaagtcctgccacacatgactcaccccggccagcgcttgagtattgcgcaggccgtagtggttgtgggtcggcagtacaccgatggttaggggaagaatgtctgacatttttctcggtcgacgctcagctctggcaaaatacctgactgttgtttttatcggccgctgtttgccgatccttaatatttttgagcgtagcgattgatgagcgaacaaccagcgaccagccgcatccaggtcgaggccttgggcgaggttttccaggcccgcgccgagcaatgggcgcagcggcttggcttgcctttgcagcaggcagatgcggacttttccctgcaagtgggggagcatggcctgcaattgcaacagctcggggctgacgcgccagggccggtgcgcgtggattttgtcgaaggcggcgcggcgcatcggcgcctctatggtggcggtagcgggcagatgatcgccaaggccgtgggcatcgcccaaggcgtgcgcccacgggtgctcgacgctacggctggcctgggcaaggacgccttcgtgctggccagcctgggttgtgacatgagcttgatcgagcgtcagccgctgatcggcgccttgctcgaagatggcctggcgcgcggcgcggatgattttgaagtggcaccgattgtggcgcgcatgaagctgctcaagggcaactccatcgacgtgatgcgccagtgggagggcgagccgccccaggtgatctacctcgacccgatgttcccgcaccgtgagaaaactgccctggtgaagaaggaaatgcgcctgttccggccgttggtgggggatgatcccgatgcgccggcgctgctggctgccgccctggccctggctagccaccgcgtagtggtcaagcgcccgcgcaaggcaccgtgcattgacgggccaaagccgagccatgcgctggatggcaaatccagtcgctatgacatttatccgaagaaagcgctcaaaccctaagattgaaaatgccctgtggcgagcgtgcttgccacagacaatgggttacggcctgtaggcccgcataaacaaccccaccacctcttgcacatgggcttcggcggcttcttcactcagttgcccgccgcagccatacagcaagcagaaattcgccgtgcccttgagcaggcagaagaaatgctcggccgccgtaaagggtttgtcgatgctcagcgcaccactctggtcgatcttgccaagcagtcgctccataccttgcagcatgcgcatggggccggcctcgaagaagatctgcgagagtttcacgtcctggttgccggtggtcatcatcaagcgatgcaggttgaccgactcttcactgttgatcagccgatggaacccccgcgcgatattcaacagcacagtttgtacgggtatgccctcgggcaactcgaagtacatcaccggcagttgttcttcgcacttggccaccaccgcggcggtgaacaaggtctctttatcgttgaagtggctatagacggtcagtttcgacacgccagcttccagtgccaccgcgtccatgctggtactggcgtagccattgctcaaaaacaggattttcgctgcttcgaggattgcctggcgttttgccatgtccttggggcgcccggggctattggtgttcagaggattgtcggacattttcacctttaatactggactggcgagtttggtattaataccatacccgccagtataattattcctagctctacttgcgaaaggtcctacagcatgcgcagcaccttcctgccctttgctttgcctgtcagtttggtcgtgctgttgaccgcctgcggccatgaagaagcggcccagattaccatccgcccagccatggtggtgcagcctcagccttcttcgcagtcgatggacagctaccccggcgaagtgcgcgcccgctatgaaccggacctggcttttcgcatcggtggcaaagtcagcaagcgtttggtggaggagggcgaacgggtcaaggccaaccagccgctggcggagctggaccctcaggacgtgcgcctgcagctggaagcgacccgcgcccaggttgccgccgccgaggccaacctgagcctggtgcggaccgagcgcgaccgctacaagaccctgatggaccgtcagatggtcagccgttcccagtacgataattccgaaaacctctaccgatccggtgaagcacgcctcaagcagatcaaggccgagttcgatgtggccagcaaccaggccggctatgccgtattgcgtgcgccccaggacggagtggtggccaagcgtgcggtggaggtcggccaagtggtgtccgccgggcaaaccgtgttcaccctggctaccgatggcgagcgcgaagtgctgatcagcctgccggaacaaggttttggccggttcaagatcggccagccggtgtcggtagagctgtggagccagccggatcagcgttttaccgggcgtattcgcgagctgtcaccggcggccgatcccaagtcgcgcacgtttgcggctcgcgtggcattcaccagcggcaaggtcccggctgaactgggccagagcgcacgcgtattcatacaggtcgacggcgatgttccgttgtcagtgccgctgtctgccctcagtgcggagaacggtgcgtcctacgtgtggcgcgtgcagcccgacaacacgctcaaacgcacgccggtgcgcattggtgccttcggtgaaaaaaccgtcccggtcctggaaggcctggccccgacggattgggtgatcgctgcgggtgtgcacgtgcttcacgagggccagcaagtgcgcccggtggaccgctccaaccgtgtggtgaatctggcggccaaggagtagtccccgatgggtttcaatctttccgaatgggcgttgcgcaatcgccagatcgtactgttcctgatgatcctgctggcagtggtcggcaccttgtcctactccaagctggggcaaagtgaagacccgccgttcaccttcaaggccatggtcatcaagaccaactggcctggcgcaacggcgcaggaagtctcgcggcaggtcaccgaacgcatcgagaaaaaactcatggagaccggcgagtacgaacgcatcgtctctttttctcgcccaggtgagtccactgtcaccttcattgctcgcgactccatgcactctgtgcagattcccgaactgtggtaccaggtgcgcaagaagatcagcgacatccgccagaccttgccgccggacattcaggggccgtttttcaatgacgaattcggcaccaccttcggtaatatctacgccctgaccggcgacggtttcgactacgccgtgctcaaggactacgccgaccgcatccagattcaactgcagcgcgtcgcggatgtgggcaaggtcgagctgctcggcctgcaggacgaaaagatctggatcgagctgtccaacctcaagctggccaccctcggcttgcctttggcggcggtgcaacaggcgttgcaggagcagaacgcggtctccactgcgggcttcttcgaaaccccgagtgaacgtgtgcaactgcgtgtatcgggcaacttcaagagcgtggaagagatccgcaatttcccgattcgcgtgggtgaccgcaccttccgcatcggcgatgtggccgacatccaccggggtttcaacgaccctccggcaccacgcatgcgttacatgggcgcagacgcgattggcctggccgtggcgatgcgcgacggcggtgacatcctggtgttgggcaaagccctggaaggtgaattcgcacgcttgcagaagaacctccctgcgggtatggagttgcgcaaggtgtcggaccaaccggcggcggtgaaaaccagcgtcggcgaatttgtgcaggtactgaccgaggcgctggccatcgtgttgctggtgagtttcttctctctcggcgtgcgcactggcatggtggtggccctggcgattccgctggtgctggcgatgacgtttgccaccatgtattacctcggcatcggcctgcacaagatttccctgggcgcactggtgttggcgttgggcctgctggtggacgacgcgatcatcgccgtggagatgatggcgatcaaaatggagcagggctatgaccggctcaaggccgccagctttgcctggaccagcaccgcgttcccgatgctcaccggtacgctgatcaccgccgccggcttcctgccgattgccaccgcgcagtcgagtactggcgagtacacccgttcgattttccaggtggtgaccattgcgttgctcgcttcgtgggtggccgccgtggtgtttgtgccttacctgggggaaaagctcctgccggacctggcgaaaattcacgcagccaaacatggcaccgatggtcctgatccctacggcacacctttctaccagcgcgtaagacgtttggtggagtggtgcgtgcgtcgccgcaaaaccgtgatcgtcctgaccctgttgctgtttatcggctcggtcgccctgttccgttttgtgccacagcagttcttcccggcctccggtcgcctggaattgatggtcgacctgaagctggccgaaggcgcctcgctgagcaacaccgctgaccaggtcaaacggttggaaacgctgctcaaggatcacgccggcatcgacaactacgtggcctatgtcggtactggatcgccgcgtttctacctgccgctggatcaacaactgccggccgccagttttgcccagttcgtggtgctggccaaaaccatcgaagagcgcgaaagcctgcgcacctggctgatcgaaaccctcaacgaacaattccccgacctgcgttcacgggttacccgcctggaaaacggcccgcccgtgggttacccggtacagttccgtgtgaccggcgaacatatcgaagaggtccgcgcgctcgcccgtagagtggcggccaaggttcgtgaaaaccctcacgtggtcaacgtgcacctggattgggaagaaccgagcaagatcgtctacctcaatatcgaccaggaccgcgcccgtgcccttggcgtgagtacggccaacctgtcgaaattcctgcagagttcattgaccggctccagcgtcagccaataccgcgaggacaacgagttgatcgaaatcctgctgcgcggcaccgttcacgaacgcaccgaactctcgttgctgccgagcctggctgtgccgacggacaacggcaaaagcgtcgcgctgtcgcagatcgccaccctcgaatatggcttcgaagaaggcatcatctggcaccgcaaccgcctgcctacggtgaccgtacgcgccgatatctatggcaaggaacagcccgcgacattggtccagcagatcctgccgaccctggaaggcgtgcgtgccgaactgccggatggctacctgctcgacgtgggcgggaccgtggaggattccgcccgtggacagaactcggtgaaagccggggtgccgctgtttatcgtggtcgtgctgaccttgttgatgctgcagttgcgcagtttctcgcggaccgcgatggtgtttctgacggcaccgctgggcttgatcggggtgaccttgttcctgctggtattccgccagcccttcggtttcgtcgccatgctcgggaccatcgccctgtcggggatgatcatgcgtaattcggtgatcctggtggaccagatcgagcaggacatcaaggcggggctggcaccgtggcaagcgatcatcgaagccaccgtccgacgcttccgcccgattgtgctgaccgccctcgcggcggtattggcgatgatcccgctgtcgcgcagtgtgttcttcgggccaatggccgtggcgatcatgggcgggttgattgtggcgactgcgttgaccctgctgttcttgccggccctgtatgctgcgtggttccgagtgaggaaggacgtcgcgtaatcatgctggccaccgtttcagccctgatgttgttgttgcttgccccaggccctaccaacaccctgttatttcgtgcaggtgtgttgtgtggcttgcgggcttcgtggaggctggcatttgtcgagtgcctggcgtacctgctgcaagtttcggtatggggcgtggcattgctgtatctgtcggcgtactcgccatgggcgctgaaggcaacgcaattggcggcagcctgctacttgctctatgtctcctacaagctttggcagcgtaagaacagtgtcatccaccccggttccgaccgtttctccgggctgtacttcttctggctgacggtgatgaatcccaagggattgctgatcgtgtcattcattgcaccgttcggcacctttgccacgctacccggctatgccgggttcatggccacgctggtgctggtggtgattccagtgggggcggggtggatcatgctgggcagccgctttgaaggaattcaaaaggcctggctcacgccattgaagatcaaccgtgcgacctctattgcgattggctgctttgccacgctgatggtggggcggttggcggaatcgatggtgaattgagggagcgcgcgtctcagatttgatgtttattgagatagttgcagttttctgctgtactcaagtctcagaaatcgaaaaattgagattttgatgatcaagttgccaccgagggtgccggaaggggttttcgttttaattggccaggaaccccatcttcagcatctttctgactatatgaagctgactcagccaaccgatagccaggggcgttacttacactttgatcaactacgtcaccgcttcccaaagcatttggatcaggcgatatgctggggcatcgtaaaatacgagcgctctcgtctgtaccagcaaatattgcccgtcggtacgcctgaggcctggtgcaagtttttactgacaccgaccgcacagcgcgtggtatccacggtcgacaggtacgcctcaactgcagcacttgagtacatgagcagcaagattgggaaggccgctcacatcaagtatctgctcaatgatttgattgaagatgaagccatcagcagcagtcagctggaaggggcagcaaccacgacgctcgtagcaaaagatatgttgaaaagagagcggctacccagaacacccgatgaaaaaatgatcattggtaattaccggatgatgcgtttcgcttgggataagagaaacgctcctctcagtgccgaactgatcgctgaaatgcatgaggtgggtgttcaaggcattgacgatgacaaatattctcccggcagctttcgtctaaatgatgacgtagttgtccaagatggtgatagcaatgtggtccatacgccccctcctgcagaaggcatcgccaaaagattggggcgattagctgactggatcaacacgtgccacgacgacgctacgacaagccgctacctccatccgttgatcaaaggtatttctctgcattttgcgctgggttacgagcacccttttcgggatggcaatggtcgcgtggcgcgtgcgttgttttattggtttatgtttaaaagcgattacgcggcattcaggtatatctccatcagtgttctgcttaagaatgccgccgttcagtacggtacgtcttacctctataccgagacagatgaactggatctgacttactttattgactaccagtgctctgtggtccagcgggcggttgatagcttcaagacgtcttacgaagaaagtgttaaggaggctgagtcgttcgagcaatggctctgggagtcagggctatacaaagagttgaacgagaaacagaagactgtatttcaggtcgccaagagtggcaccgcgaagcagttcactgcggtcaatgtgaaggaaaatctgggctgttcctacaacacggcgtcagccgtcctgaacggtcttgttgaattgaacatcttcgtcaagaagaagcagggtcgtgaatgggttttttcaatgcgtgatcaagcagaaatacaaaaaaactggttgaagacttctcgttaatttaacgaatgcccacgtcttcttgaaccgtgggcattacgggtattacagcgccccaaacaccttcttcgccaaactggtagccgccgccgccgggttctcgcgaatggtttcttcctgcttggcaatcatcttgaacaaaccgtccagtgcctgctcggtcacgtagttctcgacgttggcgctcttggcgtccaccgcaccgaaagccgcagccttgccggccagggcattgtactgctgggctacgccgaccttgtcggtagcggccttgacgatgggcaggaacttggcgcggatctgttcacggctgcttttgttcaggtattgggtggcggagtcctggccgccgctgaggatgcctttggcgtcggtcacgctcatgttcttcacggcgttgaccagaatcggctgggcctgggtcacggcggtttcagcagccttgttcatgctggtttccaactgcgtgacctggtcacccatgccgaacatcttcagcttgtcggcgactttacccagcttgcctggcaggccgatcttcacttccgggttgttgctgaaaccaccgggtacacccagttgcttcacggcgatctgcgcgccttgggtcagggcgtccttgaggccgccgctggcgtcgccctgggacaggctgctgaggtccagggccatggcgttggcaccgagcagcaggccggcacacagggcagtcaggcgaagggagttacggagcatggacgcttcctttttatcgaattcagtgggccaccgcgtcaacgcgcagacgcagtggttgaggatcctggccattgagctgcacagcgtgccgctcggtggtgataaacagtagcttgccatccacttcgatgcgagcgctcaccgagtagctgtggccgggtttgacctgggccgggtcgtagctcaggtgaaacggcagcggcacctggcctttgaccgggcctttctgctcggcgagggtcacagccggtgcatctgccagggaaacgtcttgcaggctgacactcaaggtcgcggttggcggcagggcgatgcgttgcaggtagaacacttcgccatcgaggctggccttgggggtggggctcatggactggcaggctccgagcagggcggtaaggcccaggaggatgatctttttcatggtgtcgctccttttcaagggcgccggcatccaaccggcgccttttcaaatctagcggttttcttcaggttcgatgggtatttcggccgcgccatccacacgatgcaatgccacctggcggatcgacaggcgaatctccgccggcaacacgcgcttggccgcgccttctgccagttcgccgagcaggtcgtgatagctcagcttgccggcttcatcgcggcgcagcacatcttgctccagtaaggtctggatgaaatgtcggaaaaggctcttgtcgaagaattccggggcgttgaggccatgcaggatcgacaggcgctgggccatgatcgtgcacaggtcttccagctcttcggcgctgatgctgttctggccgctgttgagcagcagcgaaatcgccatgtagaagcgttgcagggtctgggcgatgctcttggacagcagcgtcagcaacacaaagtgccgcgaactcggcgccgggcgcaggtacacgttgttttcgaaacgcagcaggccttgttcgacaaaggcttccagccactggtcgatcacgctgtcgagttcttccagcgaccagcggataaacagctccgattgcaggtacgggtacagcgcgtgggtgtagcgcaggatctgctcgcggctcatccgcgagctgctctggaagaaactcgccagcagcgccggcagggcgaagatgtgcagcacgttgttacggtagtaggtcatcaggacggcattctgctcgtccaggtacagaatcttgcccagggcatcactctgctccgacagcaggtccatgtccttgacgtgcttgatcagcgccaggccatcgccttcgggcagggtggtgtggggcgagtagggcacacggcgtaacagcgccaggtacaggtccaactggcgcgccatggcttgctcgtccagggccaggcgcgtggtggacagcagcgcgagggcgaccaggttcaccgggttcacggcggcggcttcgttcagatggcgcgccacctgttcgccgaggcggttggtggtttcgttgagccaggctggcttgtagttcggccccagttcctgggagcgccagtccggttgctcgctgtcgaggaattcggccagcttgatcggctcgccaaagttgaccgcgacctggccgaagcgctgtttgagcgcgccgaccaccttgaaaatatcgaagatcgactctttcttcttgctcgcgccacgcagttcgcctagataggtacggccttcgagcacgcgctcatagccgatgtacaccggcacgaacacgatcggcatgcgcgaggagcgcaggaagctgcgcagggtgatcgccagcatcccggtcttcggctgcaacatgcgcccggtgcgcgagcgcccgccttcgacgaagtactccaccgggaagcctttggtgaacagggtgtgcaggtattcgttgaacaccgaggtgtacagcggattgcccttgaaggtgcggcgcatgaaaaacgcaccgccacggcgcagcaggctgccgattaccggcatgttcaggttgatcccggcggcgatgtgcggtggggtcaggccattcttaaacagcaaataggacagcagcaggtaatcgatatggctgcgatggcaaggcacgtagatcacctcgtagccctgggcaaccttctgcacaccttcgatgttattgaccttgatgccgtcgtagatcttgttccagaaccagctcagcaccacttcgagaaagcggatcgcggtgtaggtgtagtccgaggcgatttcgttgccgtagcgcaaggcctgggccttggctttttccgggctgatcttttcccgttcggcctcctcaatgatggcctggcgcaccagcggcatgttgaccaggcccttcaccagattgcgccggtgggacagatcgggaccgatcaccgccgtcttcaggttacgaaagtgcacacgcaggatgcgctgggccatgcgcaccgtgcgttcgtgccctttattgtgctcgatcaattcacgcaggttgataggcgcagagaattgcacgcgggttttgcgacccaggatcaggatgctcaacaggcggcgtagacgcccggtgaccgcccagctgtcggcgaacaacagcttccacgggctggactcgctctcgggggactggccccagaacacgctgaccggaatgatttgtgcattctcttcggcgtgctcgctgagggtatcgaccaagcgggtcagcgtgggcggtgcgccgcgcttgtcctggcgaccgagccagtccggttccggggtgaggtagaagaatgccgccggttccatcagcgggccgaccgaaaccggcagcaccgggcgcggcaggccggccttggtgcactcggcatcgactacggccaattcggtgagggagggtgattgcaggacgtagaacaccggccggctgcggtccaggttgagggttagggacgactggttgatcgtctccgagcgaacccagaggtacaacagtcgacgcaaggtgccaaacactagacggcggaacggggagcgggtcataggcgtgctgcttcaagtggaaaaaaccgagcaggcgctcgggcgagtagtgtgccgtattcgccgaaaatcggcaaaaaagcagcgaagtaaacttgagttgatcgtttttgagcctgtcttatactcggcagttcaatgcgactgactcaacaataaaaaacagtgggagcaaaaacagaatggcaacgcgcgaaactggcaatgtgaagtggttcaacgatgcaaagggctatggcttcattcaacgcgaagacggcaaggatgtgtttgtgcattaccgtgccattcgcggcgaaggccaccgctccctggccgagggccagcaggtggaatacgccgtggtgaccggcgagaaggggttgcaggcggaggatgtggtcggcctttaacgcgcgctgaacccctgttgtggtgagcgggcttgaactgtggtgagcgggcttgccccgcgttgggctgcgaagcggcnnnnnnnnnnnnnnnnnnnnnnnnnnnnnnnnnnnnnnnnnnnnnnnnnnnngccgcttcgcagcccaacgcggggcaagcccgctcaccacagcaagcgcgctcaccacacaagcccttccctcatgctttcaggatcaggcggttttccaggtgatctgctcttcaccgtccacgctgatgcgaatccaggtatcggcgctttcttcgccttcttcctcgacccaggtccccggtgcacaacgcacttccacgttcagtgcagcaaacgcagcacgggcgcaggcaatgtcgtcgtcccacggcgtctggtcactttccaggtacaggctgttccatttgccgacggctttgggcagccaggtgaccggcacgttgccggccttgcatttgtaggtctggcctttctggacccagtcggtgcacgggccaatggcggcgcccagccaggcggcaatggccttgtggtcgacgtcggcgtccttcaggtaaatctcgatatcgggttggcgcatggatgttcctcgttgcgggattcgaaaatccattcgcggatactggacagtcagttattgaagcacgaaatagtcgtagcgcatcgacacagtgaccaccagcggctcggccgcctcgatcacgtgtgcccggcgctcggcgcttgcacgccagccatggggcgtcatcgccagcaggttggcgcggtcctggggggcggccaggctcagggggaattccagcgtttcgctgtgtgccaggctcatgccgtccggcaccagggccaggtgtttgtcgtcggtgtattcacgcacttcgtcgtacaggcgctcgcgcaattccatcaggtggccgctggtcgggccgaccttcatcaggccgccaccggggctgagcaggcgcttggcctcttcccagtccagtgggctgaacacgctggcgagaaattggcagctacctgacgccaatggcacgcgggccatgctggcgatcaaccaggtcagcgccgggttgcgcttgcacgcacgcttgaccgcttccttggaaatatccagtgcgtagccgtcggcgtggggtagggcttcagcgatctgtgcggtgtagtagccctcgccacagccgatatcgacccagcactgcggcgcgcgttcagcggcgagttcggccaggcgcttggccaccggggcgtagtgcccggcgttgaggaagtcgcggcgcgcttcgaccatggccaggttatcgcccgggtcgcggctgttcttgtgctgcaccggcaacaggttcaggtaaccctggcgcgcgcggtcgaaacgatgcccggccgggcacgccacgccattgtccaccgcgttgagcggggcgttgcatagggggcaggcgagcatcaggcgagcaacttgatcagggtctggtagtagatttcggtcagcacatcgaggtcgctggcgaggatgcgctcgttgacctggtggatcgtcgcgttgaccgggcccagctcaaccacttgggtgccgagggtggcgatgaaccgtccatcggaggtgccgccgctggtggacgcctgggtctcacgcccggtgatcgccttgatgctggcggataccgcatccagcagcgcacccggttcggtgaggaacggcaggcccgacagcgcccactccacgtgccagtccaggccgtgcttgtcgagaatctgtgctacgcgctgctgtagaccttcgacggtggactcggtggagaaacggaagttgaacaccgccgtcaggtcaccggggatcacgttggtcgcgccggtgccggaattgaggttggagatctggaagctggtcggcgggaagaaggtgttgccgtcatcccaatgctcggcggccagttcggccagggccggtgctgccaggtggatcgggtttttcgccaggtgcggataggctacgtggccttgcacgccgcgtacggtcagggtggcgccgagggagccgcgacggccgttcttgaccacgtcgcccaccaacgtggtgctcgatggttcgccgacgatgcaccagtccaggcgttccttgcgtgcagccaggcgttcgatcacagccttggtgccgtggtgcgccgggccttcttcatcgctggtgatcaggaaagccaccgaacccttgtggtccgggtagtcggcgacaaaacgctccgacgccaccagcatggccgccaggctgcctttcatgtctgccgcaccacggccgcaaagcatgccgtgttcatcgatcaacgcgtcgaacgggtcgttctgccacgcctgcatcgggccggtcggtaccacgtcggtgtggccggcaaagcacagtaccgggccatcgtgcttgccatgggtggcccagaagttgtccacgtcttcgatgcgcatcggctcgagcgcaaaaccggcgtcgcccaggcgctgcatcatcagcttctggcaatcggcgtcgatcggcgtcaccgaggggcgacggatcaggtcgatggcaagttgaagtgtcggcgaaaggtcggcatgggccgtcatggggaactccggaagcatgtgatgggcgcaggacgtaaggggcgcagattcagtgtgggagggggcaagtcgaatcgtcgcaccgcccctcccacacaaagcattggcctgggccaagactcataaaacggccgttatcttatagcaaaacggcggccagaggccgccgtttagtgcattgcgcgagtttttacgcagccggtgcgggttccgctgccgccgccggtttcggcagcgaagacaggaacgccatgaccagcgccgccacatacggcagcgactgcaccagcaacatcaccacccagaagcggatgtcattgctcggcaggccctgcaccaggtagatccccagcgccgcgccccacaacagcagcatgatgaacatctcttcgcgggcttcggaaatcgccacccagaagccgtggttatcggcgtttttcggtgtacggaagaacgggatgctggtggtgaagaagccatacagcaccgccttggcgatggtgtgggacaacgccagaccggccagggccgcgcagaatgcgtccttcaagttcacgcccaccgcacgccggtacaggaaaatgatcttgcccaccttgaacacgaacagcgccaacggcgggatcgcaaaaatcagcagcggcggatcgacccgcgttggcacgatgatcattgccgccgaccacagcagcgcgcccacggtgaagaagatgttcatgccgtccgctacccacggcagccagcccgcaaggaagtggtagcgctggccacgggtcagctcggtgtccttgccgcgcaacaggctcgcggtgtggcgcttgatgatctggatcgcgccgtaggcccagcggaaacgctgtttcttgaagtcgataaaggtatccggcatcaagcccttgccgtagctgtcgtggtaatacgccgccgacaggcctttctcgaacacccgcaggcccagttcggcgtcttcgcagatgcaccagtcggcccagcccagttcttcgagcaccgagcgacgggtcatggtcatggtgccatgctggatgatcgcgtcacggtcgttgcgggtgaccatgccgatgtggaagaagcctttgtattccgcgtagcagagcttcttgaaggtgctttcgttctggtcgcggtagtcctgcggcgactgcaccacggcgattttcgggtcggcgaagtgcggcaccatgtgcttgagccaattcggcgagacgcagtaatcggagtcgatcaccgcgatcacttcggcatcctcggcggtgtgcgggatcaggtagttcagtgcgccacccttgaaaccggccaggggcgcgacatggaagaacttgaagcgcggtcccagggtttcgcagtaatcgcgcaccggctcccacacggccgggtccttggtgttgttgtcgatgatcaggacttcgtagtccgggtaatcaagggcggccagggcgtcgagggtctgtttgaccatctccggcggctcgttgtagcacggcacatggatcgacactttcgggcggtagtccgaatcccccaccactggcaggaattcgcgccggcgcttgtgggtccagaccgcttccgccagttcatgggcttcggtcagcaacacgataaacacgcccagggcaccgagggccaggagaatgcccacggtgacactgaaccaggtgctgtattgctggctgtagtcgtagccgatccacaccagcaccgaaccgcacaggaatgcgataaaggtcaggaaggtgcggccgcgctggcgcagggccgagccgtcgatcatcagcagggtcagcgacaacagcgcgagcaccaccgaaccgatggccagcacgcgccactgcgggatcgcgaccacggggccttcaaagttgaatttctgctggcgtgcggcgttgtacacgccccagtaggcgcccgccgagccttcgtcgctgactttccacggctgatcgaaggcctcgatcacgaagtagttgtagccctggcggttcagcttgttcaccagcgtgcgcaggtaaatcgcctggtcggccggggaggtttcgttacccccgcgcatgcgtccgttactcggccagcccacttccgacagcagcagcggctttttcgggaacagtttcttcaggtcacgggcacggtcgagtacgtattggccggccttgtccatcgggatgtattcccagaatggcaggatgtgcgcagcaatcaggtcgacgtgcttggccagttgcgggttcttttcccagatgtgccactgttcggaggtcgtcaccggtactttcacagcggcgcgcacccggtccagcagcacaatcagcgcctcaggggtgatttcttcccggaacagcgcttcgttacccaccactacccgcaccacactgcgcgagctgttggcgatttcgatggcgcgctggatttcccgctcgttgcgttccaggtccgggctgatccagatccccagcgtcacgcgcaggccgaactcttccgccagcttggggatgtcccccagggtgccgtcgaccgagtaggtgcggatgttgtccgtcagcttgctcatgattgcaaggtcttgacgcatctggtcgtcggttgggtactggtctttctgtgggaactggccttgttggaacggcgagtaggaaaaaccggagatctgttcaggccagttgggggtggtgacggggcggttgatcagcgcccagaagccggtgaacagcgcggcgattgccagcacgatcaccaggttgagtccaaatttacgcgatgccatggctatttcgggttccaaaaggtgtggaacgaaaagaggtgtcggcctgcgccgaacggcgcgcatcctacaccggcgcttccctgaccgtacagcaagcagagaaaaaccggacattagtcagcgaaaggccatcttagttcttaacttgtagcttgaggcttcgaacttgtcgctgcgtagccctataatgcgcgccggtttttggggtaatggtcatgagtacagaagatccgcggtttgcaggcgtcgcccgcttgtatggcattgaaggcctggaacgcttgaaagcggcccatgtggcgatcgtcggcgtcggcggtgtgggctcgtgggcggcggaagccgtggcccgttgcggggtgggcgagatttcgctgtttgacctggatgacgtctgcgtcagcaacagcaaccgccagttgcatgccctggacagcaccgtaggcaaacccaaggtcgaggtgatggccgagcgcctgcgcggcatcaacccggactgcacggtgcatgcggtggccgacttcgtgacccgcgacaccatggccgaatacatcacccccaacatcgattgcgtgatcgactgcatcgacgcggttaacgccaaagctgcgctgatcgcctggtgcaaacgccgcaagatccagatcatcaccaccggcggcgccggcgggcagatcgacccgacattgatccaggtgtgcgacttgaaccgcaccttcaacgacccgttggcgtcgaaagtgcgctcgaccctgcgccgtgactacggtttctcgcgtaccgtgacccgccattacagcgtgccgtgcgtgttttccaccgagcaactgcgttaccccaagccggatggcagcatttgtttgcagaaaagttttgtcggggatggcgtgaagctggactgcgcgggtgggtttggcgcggtgatgatggtgaccgccacgttcggcatggtggcggcgaccaaggcggtggacaagattgtggccggggtgcgtaggccgtcggagcgggtcaagcccacttaaatctaggaacccgacataattcaaatgtgggagggggcttgcccccgatagcggtggatcagccaacttgttcagtgactgacaccctgcaatcgggggcaagccccctcccacatttagctttgtttatgactgatttcgcgcatacgttgcagcaccgcgttgaggccattgctgcgcgacggtgacagttgacgggaaagccccaattgattgaaccagtcgggcaagtccacggccagcagctcggcagcagaaagcccattgacccgcgccagcagcagcgccaccaacccacgaatcatccgtgcatcgctgctggcggcgaactgccagtggccgtcctgcaaacgccccaccaaccacaccaggctttcacagccctgtaccaggttggcgtcgactttgtcctcggcggccagggcaggcagccgttcgccccactgcatcagcatccgcgcgcgttgttcccaactgccgacggactgaaaggcttccagcgcagcaaccgcctccattggcaggctcatcgcagcatatccagcgcctggtccagcgcttcaaagaagcgttccagatcatccgaatcgttgtacagcgctagagacacacggatcgcccctgacaactccattgccttgagcagcggcattgcgcaatggtgtcctgcgcgtacggcaatgccttgctcggtgagcaagtgcgcaagatcagcgttatgcacgccatcgacaacgaagctgaccaacgccacctgcggcgcgcccagtatgtgcacgccattgcgcgctttgagcccacgcaacaggtagtcatgcagcgccgcttcatgggcgacgaccgcttgttggtccagcgaattcaggtaatccaggctggcacccaggccgatcacactggcaatcggcggggtgcctgcttcgaaacccagcggcgccgggcggaaactggcgctgtggtagtcggcctgttgcaccatctcgccgccaaactgccagtgtcgcaagtggtgcagggctgcgttgcggccaaacagcacgccgacgccatccgggccatagagcttgtggctggaaaacacatagaagtcgcaacccagggcctgcacgtcgtggcggccgtggacgatgccttgggcgccatcgaccacggtcagtgcgccgtgggccttggccgcagtgatcagcgcttccagaggctgccaggcgccgagcacgttggataactggctcaccgccagcaggcgtgcgcgcgggccgatcagcgcggcggcggcttgcaggtcgatcacgccgtcatcattcaacggcagcaccaccagcgtggcggcgcggcgtttggccagttgctgccagggcagcaggttggcgtggtgttccagggcgctgacgacaatctcgtcgcccgcattgaataagtgctcaaggccgtaggccaagaggttcagcgcagaggtcgcgccgtgggtgaacacgatctgcccactgtcgcctgcattcaaccactgcgcgaccttgctgcggctgtcttcgaacgcctgggtcgcatgggcgccgggcaagtgctgggcacggtgcacattggctgcgccattggcgtagtaatggctgatcgcatccaacagggcctggggcttttgtgtggtggcggcgttgtccaggtacgtctggtcttgccgttgcagggtggcgatggccgggaaatcggcgcgccagggggagggcactagcatggtgttcaagactcgtataagcgagccccagggtcggggcccgctagtggcatcgagtggctgcttagttgtgagcgtgcagcgcttcgttcagttcgatggccgatttgtgggttttgcactccacggcaccggtctcggagttgcgacggaacaacaggtccggctggccagccagttcgcgagccttgaccactttgaccagttggtttttctcgtccagcagcgcgaccttggtgccggcggtgacgtacaggccggactccacggtgttgcggtcgcccaacgggataccgataccggcgttggcgccgatcaggcagccttcgccgaccttgatcacaatattgccgccacccgacagggtgcccatggtggagcagccgccacccaggtccgagcccttgccgacgaacacgccggccgatacacggccttcgatcatgcccgggccttcggtaccggcgttgaagttgacgaaaccttcgtgcatcacggtggtgccttcgcccacataagcacccaggcgcagacgcgcggcatcagcgatacgcacgccgctcggcactacgtagtcggtcattttcgggaacttgtccaccgagaacacttccagcagctcgccacgcaggcgcgcttcgagctggcgttcggccagttcgttgatgtcgatcgcgccctggctggtccaggccacgttcggcaactgcgggaacacaccggccaggctcaggccgtggggcttgaccaggcggtgggacaacaggtgcagcttgaggtaggcctcaggcgtggaggtcagtgcggcgtcttcggccagcagggtggcaaccagcggggtgtggctttcagccaggcggttgagcagcgcggcttgggtggcgtcgacattcttgagggcatcggccagttgcagcgcttggctgatggtgaaggtgatggcctggttgccttcggtgtaaccgaggatcggcgcgatggccgcgacgatttcagccgatgggttgagcagcggttgcgcgtaaaacacttccagccaagcaccttggcggttctgagtgccgacgccgaagcccaggctgaacagggaattggacatgctgttacctctacaaaaatggaaagggctggcctacttgagggccgccgaataactatctggcttgaagccaatcagggttctgtcaccgagatcaagcaccgggcgcttgatcatcgaaggttgtgcgagcatcaattcaatggctttcgactgatcgagatcggctttgcgttcgtcttcgagtttgcgaaaggtggtgcccgcacggttcaaaaccacctgccaaccgtgctcgttgcaccattgggtcaagtgttcgcggtcgataccggccgttttgtagtcgtggaactcatagcccacgccgtgctcatcgagccaggtgcgcgcttttttcatggtgtcgcaggctttgatgccgaaaaggtgcaacgttttgcttgaagcggtcaaggaattgcccccctttggaccaagtagaaattaaaggtcacggattatgccacgaccagcgggaccgtgcccctcgtcatgctggcgtgcgacttatgtgcaaaggccggtcggcagcataggcggttaacatagccgggcaatatggcacttcaacggccagttgttgcctgatgtgtgtcgttgcaagtcgattgtccgggaaacccgcgttatgcaaaccgcctataccgttcttatcctgctgatgctggtcagcgtttcgcgtctggttgggcgtgtcattcctctgccgttgcccctggtgcagatcgccgccggtgccctgctggcctggccgacgctgggcctgcacgtggcgctggacccggagttgttcctgtttctgttcctgccgccgctgctgttttcggatggctggcgcatgcccaagcgtgagttgtggcggttgcgtgggccgatcctgacgttggcggtggggttggtgttgttcacggtggtcggtgctggttatttcattcactggatattgcctacgatcccgctgccggtggccttcgccttggcagccgttttgtcgccgacggatgccgtggcggtgtcggcgatttcccagaaccgtctgcctacgcccttgatgcatatgctgcagggcgaggccctgatgaacgatgcgtcgggcctggtgacgttcaagtttgccctggcggcggcgttgaccggggtgttttccctggcggatgccagcctgacctttgtgttggtcgctgtcggtggcttggctgttggcgtagccctgagctggctggtcggccgactgcgcgcctggatgatcgcccgtggctgggatgacccggcaacccacgtggtgttcatgttgttgctgccatttgccgcctacgtgctggcggagcgcctgggcgcctcgggcatcttgtcggcggtcgccgcgggcatgatgcaaagctggcttgacctgctgccacgccagaccagcacacgcttgctcaatcgcagtgtctggtcgctgttggagtttgccttcaacggcctgatcttcctgctgctgggcctgcaactgccggacatcatcaaggccgtggtcagccacgagacaacgctatggccgaccctgttttatcgctgcctggatgtgatcgcgatcttcctggtgttggtggtgctgcgttttatctgggtgcagagcatctggcggctgtcaggcctgttacgccgaattcgtgggaaaagcgagctgacgctggtgccgaccgcccgttcctgctggttgttgactgtgggtggtgtgcgcggtgcggtgacgttggccggtgtcatgtcggtgcctttgctgctggcgccgggccaggactttcccgagcgcgacctgctgatcttcatcgcggcaggcgtgatcctcctgtcgctgatcgctgcctgtatcgccttgccgttgttgttacgtggcattgaaaagagcccggacgagaaacgtcacaaagaggtccgcgaggcctggaaaaaaacggctgtggctgcgatccatgcgctggaagcagaagaacccgctgagcccgaaagccaggacgccgcccaggcggcacttgccactgagctcaaggcacggctgatgtcggaatatcgccatcaattggaggtgttcaacgactcggccgaggcccaggtgctggcgcagcagatggacctgcttgagcgcaaactgcggctcaaggcgctgcgggcgcagcgcctggagttatatagcctgagtcgtcatcaccagattggtgatgacgtgttgagggaggtgttggcggatctggacatgagtgaggcgaatctggggcaggtgaaatgaccaccaagccctttagcggcgacgctgaataaaatcgcgaatgcgttcagccgcttccacacattccgccagcggtgcaaccaacgccatgcgcacgcgcccggcaccggggttgaaaccatccacttcccgcgacagatacgagcccggcaccacggttacatgttcttccacgaacaagtcgcggcagaacgcggcgtcgtcgccattcacattcggccacaggtagaagccgccgtccgggctctgcacatccagcactggcttgagaatcgccagcaccgcgtcgaatttctcgcgatacaggtcacggttggccagcacgtgggcttcatcctgccaggcggcaatgcttgccaactgggtctgcaccggcatcgcgcagccgtggtaggtgcggtacagcaggaacgccttgaggatgtcagcgtcgccggccacaaagcctgagcgcaggcccggaaggttggagcgcttggacaggctgtggaacaccacacaacgcttgaagtcctgacgccccagttcgacgcaggcgctcagcaggcccggcggcggggtttgttcgtcgaagtacagctcgctgtagcactcgtcggcggcgatgacgaagtcatattcgtcggccagggcgatgagttttttcagcgtttcgaccgggatcagcgcgccggtcgggttgccgggggagcacaggaacaggatctggcaacgcttccagatgtccggggtcacggcgtcgaagtccgggttgaagccattggcgtccaggcatggcaggtagtgcggcttggccccggccaggaacgcggcgccttcgtagatctggtagaacgggttcgggctcaccaccagcgcgtcgtcgccacggttgaccacggtctgggtgaaggcgaacagcgcttcacgggtgccattgaccggcaggatattgcgcgccgggtcgagccagcccttgggtacgttgaaacggcgttcgcaccaggcgccgatggcctcacgcagcgccgggatgcccagggtggtcgggtagaccgccatctggtcgagattatcggccagggccttggccacgaattccggggatttgtgcttgggttcgccgatggacagcgcaatcgggcgcttgtccgggtttggcgtgacgctgccgagcagggcgcgcagtttctcgaacgggtagggctgtagctggttcagggcgttgttcatggaaatctcgttcaattcggttgaaagcatgcggtctgctgggcgcagcgattcttatgtgggagggggcttgcccccgattgctgactgtcagttgaaatattcgtagctgacccaccgctatcgggggcaagccccctcccacacaagccctgcttcacagattaatccgcgtattcaaatagtcaggcgcgtgagttcgacgccgggctcctgggtcacgctcaactgctggacgatggcttcctgcaaacgcaggcacagctcagggtcggacagcggctgattgtcggcatcggtaatgaagaacacgtcctccacccgctcgccgagggtcgcaatcttggcgttctgcaacgacaggtcgaactccaggaagatcccgccgatgcgtgccagcaggcctgggcgatccggagcgctgagttccagtactgtgaccggccgttgggcgtcgttggaaatggtgacctggggtgcaaacgcaaagtgcttgagctggcgcggcacccggcgctggatgatggtcgggtagtcgtcagggttacgcagggcctcggtcaggccttcgcggatcttcttcacgcgcgccgggttgtcgccaatcgagtcgccatcggtgtcgagcacgatataggtgtcgagggtgaactggctgctggaggtgatcacccgggcgtcatggatgttcaggttgagctggtccatggcggccacggttacggcgaagaagtcgtgctggtccggcgcgtagatgaagatctgcgtgccgccttcgaattcgcgttgggtggtttccttgatcagcaccaacgggccgccatcggccggttgctgcaggatcgcgtcggtatgccaggccacatcaccggcggtgtgacgcaggaagtaatcgtcgcccagttgcgaccacagttgctcgacatcgtccgggtcgttgccgccgcgcaccaggatatccagggctgcgctctgtgtgcgccgaatctgctcttcgcggtccaccgggttttccaggccacggcgcagggcacgcttggtctcggtgtacagctggcgcagcaggctggcgcgccacgagttccacagcgtcgggttggtcgcgttgatatccgagacggtcagcacgtacaggtagtcgagacgggtttcatcaccgacgatctgtgcgaagtcgtggatcacctgcgggtcggacaagtccttgcgctgggcggtcgtcgacatcaccaggtggttctgcaccagccagacgatcaggcggctgtcccacagtggcaactggtggcgctggcagaaggcttcggcatcaaccgcaccgacctcggagtggtcgccgtgcctgcccttgccgatgtcgtggtaaagaccggccaggtagatcaactcgggcttgggcagcttggccatcaatttactggccagcggaaatttctccgacacctgggtgtactgcaacttacgcaggtgcttgatcaggttcagggtgtgggcgtccacggtatagatgtggaacaagtcgtgctgcatctgcccgacgataaaaccgaattccggcaggtagcgcccgaggatgccgtaacggttcatgcgccgcaggttgcggtggatgccgatcttgcacttgaacagctcgatgaacaggctggtgttgcggatatcgttgcggaagtcgtcgtcgatcaggtgccggttttcccgcagcaggcgaatggtgtcggcgcgcacgcctttgatttccggctgttgggccatcagcacgaagatttccagcatggcgaacggcgtgcgacggaacacgttgtcgttgcgcgcctcgatatagccgtcgtgcagttggaagcgtgcattgatcggttgtggcggcgcttcgtcttcaggggccaggatcacttcttcgaaatgctggatgatcaggtcgctgagctgggcaatgctcatgaccacacggtaatactgctgcatgaagctttcgatgctggtcttcgcgtcttcgccttcaaaacccagcagggtggcgatggagcgctggtggtcgaacagcaggcggtcttcggaacgcccggccagcatgtgcagggcgtagcgcaccttccagaggaattcctgggatgaagccagcagggcgttttcgctttctaccaggaagccttcgccggccagggcgcgcaggttcagggtgccgtactggcgacgcgcaacccacagaatcgtctggatatcccgcagcccgcccggcgagcctttgacgttgggttccaggttgtattcggtgtcgttgtacttgtggtgccgggccttttgctcggcgcgcttggccaggaagaagtccttgctcggccacatgtgtgcggtgctggtgacttcgagcatgcgctggcgcaggcgctcggggccggcgatggtgcggctttccatcaggttggtgatcacggtgaggtcggcgcgcgcctcttcggcgcattcgtccaccgagcgcacgctttggccgacttccagtccgatgtcccacaacagcgtcagaaaacgctcgatggaatcgcgaaagatctcatggtcggcgctgtccagcaggatcagcaggtcgatatcggagtagggatgcagctcgccgcgcccgtagccgccgacagccaccagggcgatgtctgcgtcttcgctccaactgaactgttcccaggccttttgcagaatgttatcgacaaaccaggcccggtcctcgatcagccggcggatgtcccgaccactgcgaaagcgcgcgtcgagtacctcgcgggcctggcggatagccttcttgaacgcggcgatggggctcgccttcagggccagttcggcctggaactggccacggtcgaagagttcgggatccacctggggcatcgatcggctttcctttctatctattcagtcagtcacaacacagtgggggaaaaccaaagcaacctttaggccgaaacgcgtgggatcgtgtcgtcagcgcgcagggtaaagatctcgtagccggtttcggtgaccagcaaggtgtgttcccactgggccgagagcttgcggtccttggtgatggcggtccagccgtcgcccagtaccttggtgtcggccttgccctggttgatcattggttcgatggtgaaggtcatgcctgccttcagttccataccggtgccggcgcggccgtagtgcaggatctgcggctcttcgtggaagacggtgccgataccgtggccgcagaattcgcgtaccaccgagaagccgttcttttcagcgtgcttctggatcacttcgccgatgtcgcccaggcggcagccgggcttgacgatctcgatggccttgtacatgcattcctgggtgacctgggacaggcgctcggcccagaccggtacgttaccgacgtggaacatacggctggtatcgccaaagtagcggtctttgatcacggtgacatcgatgttcaaggtgtcgccatccttcaacggcttgtcgcccggaatgccgtggcagaccacgtggttgaccgaggtgcagatcgacttggggaagcccttgtagttcagcggcgcagggatggcgccctgcacgttgacgatatagtcgtggcagatctggttgagggtctcggtggtgacgccgggcttgacgtgttcggcaatcatttccagcacgtcggcagccagtttgccggcgatgcgcatgccagcgatgtcttcggcggttttcaagctaacggtcatacaggctctctctagcgcgacgcgctgaaatcaatacggtttacgggcgtgcgacaaaaggttgcagaattcgcacaagccacagaaaacgcgattctaacagaccatggcgtcaaatcatgagcctctgatgatcgcttctgtctataaggtagggctatgtcggctctattcaaggggttacacgaaggcgcgctacggcaaatgtgattgcgtgttccgtttttgccgatgctgtggtataaaatgcgccgctttccggggataccccgcaaagcttaaatccacacacgtgtcgacacgatgacctgggtgccggaggccttgatgccgctggttggtcattgggatacgtggaggccaaacccgacttattaaggaactatcatgtcccaagtcaacatgcgcgatatgctgaaggccggtgtgcacttcggtcaccagacccgttactggaacccgaaaatgggtaagtacattttcggcgcgcgtaacaagatccacatcatcaaccttgaaaaaaccctgccaatgttcaacgaagcgctgactttcgtagagcgcctggcccagggcaaaaacaagattctgttcgtcggcaccaagcgttccgctggcaagatcgttgctgaagaagcagcacgttgcggttcgccgtacgtcgatcaccgctggttgggcggcatgctgaccaacttcaaaaccatccgtgcttccatcaagcgtctgcgtgaccttgaagtgcaagccgaagacggtactttcgccaagctgaccaagaaagaagcgctgatgcgctcccgtgacctggaaaagctcgatcgttccctgggtggtatcaaggacatgggcggtctgcctgacgcactgttcgttatcgacgttgatcacgagcgcatcgcgatcaccgaagccaacaagctgggcatccctgttatcggcgtagtcgataccaacagcagcccggaaggcgttgactacatcatcccaggcaacgatgacgcaatccgcgctatccagctgtacatgggttcgatggctgacgctgtgatccgtggtcgcaaccacgttgctggcggtaccgagcagttcgttgaagaagctccggtagctgccgctgagtaattagcgccctggcgttgactcagtaagcaaaaagggggcttggccccctttttgccacctcgaaaaccatttgtcggcagcgcagctacatcatctgtaacgtgcagcggcctacaagggagattcgggaagaattgatcgcccgtttgatcgggtggaatggttgaaaacctatccaagaggattttgaaatggcagagattactgcagcgttggttaaagaactgcgtgagcgtaccggcgaaggcatgatggattgcaaaaaggccttgaccaaggccggcggcgacatcgaaaaagccatcgacgacatgcgtgcctccggcgccatcaaggccgccaagaaagctggcaacgtcgctgctgaaggcgctatcgctctggttgaagacggtaaagccgccgttctgctggaagtgaactcgcagaccgacttcctggccctgcaagatgacttcaaggcattcgttgctgccagcgtcaagaaagcattcgatgagaagctgactaccgttgagcctctgatcgaagcccaagaagctgatcgcctggttctggttggcaaggttggcgaaaacgtcaacatccgtcgcctgactcgcgttgaaggtgatgtggttggtggttacctgcacggcaacaagatcggtgtagctgttgttctgaaaggcggcgacgttgagctggccaaagacatcgctatgcacgttgctgccagcaaccctgagttcctgctgccttcggaagtgtctgccgaagcgatcgagcgtgaaaaagctgtgttcctgagcctgaacgccgacaagatcgccggcaagccagagaacatcgttgaaaacatgatcaaaggccgtatcagcaagttcctggctgaagcgagcctggttgagcaggcgttcgtcaagaaccctgaaatcaaggttggcgaactggccaagaaagccggtgctgaaatcgtttccttcacctactacaaagtaggcgaaggcatcgagaagccggtcgacaacttcgctgaagaagttgctgcccagctggctgccgccaagcaataagacagttttcaactgtcgcccgaaagaggctgcccgctcacgcgcgcagcctcttttcaaatgggaaggctgattttaattggcttcctttcggaactggcttacaaagccgtgttccgatggcgctgtgacagcgtccagctagagtgaacgcaagccgtaaacggctcgccaagaatttttaaaatacgccgcaggagagattcgcaatggctcagcagggcagtggttatcaggctcgctataaacgcattctactcaagcttagcggcgaggccctgatgggctcggaagagttcgggatcgatcccaaggtgcttgaccgcatggcgctggaagtcggccagttggtcggcatcggcgtgcaggttggcctggtgatcggtggtggcaacctgttccgcggcgcggcactgagtgctgcaggcatggatcgggtcaccggcgaccacatgggcatgctggccactgtgatgaacgccctggccatgcgcgacgccctggagcgtgccaatatctcggctatcgtgatgtcggctatttccatggtcggcgtgaccgatcactatgatcgccgcaaagccatgcgccacctgaactccaaggaagtggtgatcttcgcggccggcacgggtaacccgttctttaccaccgattcggcagcctgcctgcgcgccatcgagatcgatgcggacgtggtgctcaaggcgaccaaggtggatggcgtgtacaccgcagacccgttcaaagacccgcatgccgagaagttcgatcatctgacctacgatgaagtgctggatcgcaagctgggcgtgatggacctgacggctatttgcctgtgccgcgaccacaagatgccactgcgcgtatttaacatgaacaagcccggcgccctgctgaatatcgtacacggcggcgcagaagggactctgatcgaggaaggccaacaatgatcaacgaaatcaagaaagacgcccaagcgcgtatgcagaaatccctggagtctctgagccatgcattcggccagattcgtaccggcaaggcgcacccgagcatcctgggcagcgtgatggtgccttactacggctctgatacgcctatcagcagcgttgccaacattaccgttaaagactcgcgcaccctgcaagtcgtagcctttgagcgcaacatgctgggtgctgtcgacaaggccatccagagcgccggtttgaacctcaacccgaccaacctgggtgagttgctgctgatctccatgccggccttgactgaagagacccgcaagggcttcaccaagcaggctcgcagcgctgcagaagacgcgcgtgttgctgtacgtaatatccgtcgcgatgccttgggtgacctgaagaagctggtcaaggacaaggaaatcagtgaagacgaagagcgtcgtgccaccgccgatatcgacaagttgaccaaggatgccgaggcccagatcaccaaggccacggaagaaaaagaaaaggacctgatggccgtataaggggtcaggacgccttcatggaaaagaccaagcagactgtgccctccgtggtgccgcgccatgtcgcgatcatcatggatgggaataatcgctgggcgaagaagcgctttatgccgggtgtcgccgggcataaagcgggtgtcgatgcggtaagggctgtgatcgaggtgtgtgccgaggccaaggtcgaagtgttgaccctgtttgcgttctccagtgagaactggcagcggcccgccgaagaagtcagtgccttgatggatctgttcttcaaggccctgcgtcgtgaggccaagcgccttaacgacaacaacatcagcttgcgcatcattggcgaccgctcgcgtttccacccggaacttcaagctgccatgcgtgaggctgaggcgatcacggctggcgccaaccgttttgtgctacagatcgcagccaactacggcggccagtgggatatcgcccaggcagcgcagcggctggctcgtgaagtgcaggccggccatctgcgcccagacgacatcacgcctgaactgttgcaaacctgcctggtgaccggtgacctgccgttgccggacctgtgcatccgcaccggtggtgagcaccgcatcagtaatttcctgctgtggcagctggcctataccgagctgtacttctccgacctgttctggccggacttcaaacacgatgccatgcgtaatgcactggccgatttcgcttcccgtcagcgtcgcttcggtaaaacgagcgagcagatcgaagctggagcccgggtttaaatgcttaaacaacgaatcatcacggcactgatcctgttgccgattgccctgtgcgggtttttcctgctcgacggctccggctttgcgctgtttatcggcctggttgtcaccctgggtgcctgggaatgggcgcgcctggcggggttcagtgcgcagctcccacgcgtggtgtatgccgctgtcgtggctgccttggcgtttctcttgtacatcctgccggacctcgcgccctgggtgttgggggcggcagtgttgtggtgggcgctggcgacgttcctggtactgacctatccgcgcaccagcggtcaatggaccagtgttgcctgcaagctggtgattggcttgctgatcctgctgccggcttggcaagggctggtggagatcaagcgttatccaatgggtaactggttgatcctggcagtcatggtgctggtgtggggggctgatattggtgcctacttctccggtcgggctttcggcaagcgcaagttggcgccggcggtcagtccgggcaagagctgggaaggtgtctatggtggtttggcgttgacgctgatgatcgcgctggtcgtcggtgtggtgcgcggttgggcggcgaaggaaatcttcctggcgctgctggccacggccattgtcgtgcttgtttcggtggtgggcgacctcactgaaagcatgttcaagcgtcaggcgggtatcaaggacagcagtaacctgctgcccggtcacggtggtgtattggatcgtatcgacagcctgacggcggccatcccgatcttcgcagtgctgctatggatgactgcttcgtgagccgccttcaacaagtgaccgtgctgggtgcaaccggctcggttgggctgagcaccctggatgtaattgcgcgtcatcctgatcgctatcaggtctttgcccttactgggtttagccgcctgagcgagctgttggccttgtgcgtgcgccacgcaccgcgcttcgtcgtagtgcctgaggcaggagcggcgcgtggcttgcaggatgatctgcgggctgctgggctggcgactcgagtgttggtgggcgaggaggggttgtgtcaggtctcggctgacgccgaggtggataccgtggtcgccgctatcgtcggtgccgccggcctgcgtccaaccctcgccgctgtagatgccggcaagaagatcctgctggccaacaaagaagcgctggtcatgtctggcgcgctcttcatgcaggcggtgcgcaaaagcggcgccgtgctgctgccgctcgacagcgagcacaacgcgatcttccaatgcatgcccggcgactatgcgcgtggcttgagccaggttggcgtgcgtcggatcctgctgaccgcctccggtggtccgttccggcaaactcctctggccgagcttgagcatgtttcgcccgaccaggcgtgcgctcatccgaactggtccatggggcgtaagatctcggtggattcggcgagcatgatgaacaagggcctggagctgatcgaggcgtgctggttgttcgatgcacggccggatcaggtcgaagtggtgattcacccgcaaagtgtgatccattccctggtcgactatgtagacggttcggtcctggcccagttgggcaaccccgatatgcgcacgccgatcgccaatgccttggcctggccggagcggattgattccggtgtcgccccgctggatctgtttgcagtggcccgcctggacttcgaggcgccggatgagcagcgctttccttgcctgcgcctggcccggcaagcggccgaagcgggtaacagtgcgccggcaatgctgaatgcggccaacgaagtggctgtggcggcgtttctcgaacggcgcatccgctttccgcagatcgcgagtatcatcgaggacgtcctggcgcttgagcctgtcgtggcggtgaatgacctggcggcggtattcgaagccgataccaaggctcgcgccctggcagagcaatggttgagctgcaacgcgcgttagtctgtgggcgggttcgagccttcaggcactggattggaatgcggagaaattagatgagtgcgctttacatgattgtcggcaccctggttgctctgggtgtgctggttaccttccacgaattcggtcacttctgggtggcacgtcgttgcggcgtcaaggtattgcgcttttccgtcggcttcggcatgccgctgttgcgctggcacgaccgccgtggcacggagttcgtgatcgcggccatcccattgggtggctacgtcaagatgctcgatgagcgtgaaggcgaggtgccggcagaccagttggatcaatccttcaatcgcaagaccgttcgtcagcgtatcgccattgttgctgcaggtccgatcgccaacttcctgttggcgatggtgttcttctgggtattggccatgctgggcagccagcaggtgcggccggtgatcggtgcagttgaggcggacagcattgccgccaaggcagggctggttgctggacaagaaattgtttccattgatggcgaacccaccacaggttggggtgcagtcaatttgcagttggtgcgtcgcctgggtgaaagcggcaccgtgaatgtagtggtgcgcgagcaggactccacggccgagagcccgcgtgagctggctctcgaccactggctcaagggcgctgatgagcctgatccgatcaaatccctgggcatacgtccatggcgtccggccttgccgccggtgcttgccgagctggatccgaaaggtccggcccaggctgcgggcctgaaaaccggcgatcgcctgctggctctcgatggtcagccactgggtgactggcaacaggtggtcgatctggttcgtgtacgccctgataccaaaattgtgctgaaagttgaacgcgacggtgctcaaatcgacgtccctgtgaccttgtcggttcgcggggaagccaaggcggccgggggttacctgggcgccggagtcaaaggtgtcgattggccgccatcgatggtacgtgaggtgagtttcgggccgttggcggcaattggcgagggtgcgaaacgcacctggaccatgagtgtactgacgctcgaatccctcaagaaaatgttgttcggcgagctctcggtaaaaaacttgagtggaccgataaccattgctaaagtggcgggcgcttctgcccagtcgggtgtcgcggatttcctgaatttcctggcttatctgagtattagcctgggggttctgaatttgctgcccattccagtattggatggggggcatctgttgttttatctggtcgagtgggtgcgtggtcgccccttgtcggatcgggtgcagggttgggggatacagatcggtatcagtttggtggtcggggtgatgttgttagccctggtcaacgatctgggtcgactgtaacgcttcgctgaattgcgaatctgccgcattttgcggcagtttgtttattgccagttggaataagaaaggacttcatgaaacgtctgctgctaactgcggttctcaccgtattgatgatcgccgaagttcacgccgagtccttcaccatctccgatattcgcgtcaacggcctccagcgggtttccgcgggtagcgtctttggtgccttgccgttgaacgttggggaacaggctgatgaccgtcgcctggtggaatccactcgtgcgctgttcaaaaccggtttctttcaagacatccaactgggtcgcgaaggcaacgtcctggtcatcactgtggtcgagcgaccttccgtcgccagtatcgagatcgaaggcaacaaggcgatctcgactgaagacttgatgaagggtctgaagcaatccggcctggccgaaggcgagatcttccaacgcgccaccctcgaaggtgtgcgtaacgagctgcaacgccagtacgttgcccagggccgctactccgcgaccgtggaaacggaagtggtgccgcagccgcgcaaccgtgtcggcctcaaggtcaacatcaacgaaggcactgtggcggcgatccagcacatcaacgtggtaggcaataccaagttctctgatgacgacctgatcgacctgttcgaactcaagaccaccaactggctgtcgttcttcaagaacgatgacaagtacgcccgtgaaaaactgtccggtgacctggaacgtctgcgttcctactacctggaccgtggctatatcaatatggatatcgcttcgacccaggtgtccatcaccccggacaagaagcacgtctacatcaccgtcaacgtcaacgaaggcgagaagtacaaggttcgcgacgtcaagctgagcggcgacctgaaagtgcctgaagaccaggtcaaggcgctgttgctggtgcagaaagaccaggtgttctcgcgcaagctgatgaccaccacgtccgaactgatcacccgtcgcctgggcaacgaaggctacaccttcgccaacgtcaacggtgtgccgacgccccatgatgatgaccacaccgtggacatcaccttcgtggtcgatccaggcaagcgtgcctacgtgaaccgtatcaacttccgtggcaacaccaagtctgcggacgaagtgctgcgtcgtgaaatgcgtcagatggaaggcggctgggcctcgacttacctgatcgaccagtccaagacccgtcttgagcgcctcggcttcttcaaggaagtcaacgtcgaaaccccggccgtaccgggtgtggatgaccaggttgacgtgaactacgccgtggaagaacaagcatcgggttccatcaccgccagcgtcggtttcgcacagagcgccggcctgatcctcggcggttcgatcacccagaacaacttcctgggtactggtaaccgagtttccatcggcctgacccgaagcgaataccagagccgatataacttcggttataccgacccctactggactgctgacggtgtgagcctgggctacaacgccttctatcgcaccactgactacaaagacctcgacgttgacgtagccagctatgcaatcgacagccttggtgctggcgtgaacgtgggttacccgatcagcgagacctcgcgtctgacgttcggcttgaccgcgcagcaggatgagatcaagaccggtgtctacaccgtggacgaaatcttcgacttcacccgtcgtgaaggtgacaagttcctgaacttcaaggcgtccgccggctggtccgagtcgaccctgaacaaaggtgtactggcgacccgtggtcattcccagagcctgaccctggaaaccaccacgccgggcagcgacctgtcgttcttcaagctcgactaccgcggccagctgttccagccgttgagcgacaactacaccatgcgcctgcacactgagctgggttatggcgatggttatggttccaccaatggtctaccgttctacgagaactactatgcgggtggcttcaactccgtacgtggtttcaaggacagcaccctgggcccgcgtggtactccgagccgtggtgttggtgtaaccggtaaccagggcaccgtagcggactccgacaacgacccactgccgttcggtggtaacgtcctgatccagggtggtgcggaaatcctgttcccgctgccgttcgtgaaagatcagcgctccctgcgtacttcggtattctgggacgtgggtaacgtgttcgactccaaatgcgagcagatccgtaacccgagcggcgtgaagtccaacactcagtgtaacgacgtgagcctgagtaacctggcaagctccgtgggtgtgggtgtgacctgggtgactgcgcttggcccattgagctttgctctggccatgccgatcaagaaaccggataacgctgaaacccagattttccaattctccctcggccagacgttctaagcgtctgacccaagataacgacaacggattctgtaggagtacatcgtgcgtaagttgactcaattggtgctgctggcaaccgtgctggtaaccaccccggccttcgccgaaatgaaaattgccgtcctgaactatcagatggccctgctggaatccgatgcggccaagaaatacgccgtggatgccgagaaaaaattcggtccgcaactgaccaagctcaagaccctggaaagcagcgccaagggcatccaggatcgtctggtagccggtggtgacaagatgcagcaaggcgagcgcgagcgtctggagcttgaattcaagcaaaaggcccgtgactaccagttccagtccaaggagctgaacgaagccaaggctgtagctgaccgtgaaatgctgaagcagctgaagccgaaactcgacagcgctgtggaagaggtcatcaagaagggtgcctttgacctggtgttcgagcgtggcgctgtgatcgacgtcaagcctcaatacgacatcacccgtcaggtgatcgagcgcatgaaccagctgaagtaagccatgaccgcgactatcaagctcggcgagttggccgagttcctgggggccaccttgcgtggctccccggagaaggaaatcactgggctagccaccttgcaggaggctggcccagctcagttgagcttcctcgcaaacccccaataccgtaaatacctggtcgacagccaagccgcagccgttttgctgaaggccgccgatgccgaagggtttgtcggggatgcgctggtggtggccgacccgtacctggcgtatgcgcgggtgtcgcacctgttcgatccgaaacccaaggccgccagcggtattcacccatctgcggtgatcgccgatgatgcccaggttgacgccgcagccagcatcggtgcctttgcggtgatcgagagcggtgcgcgcattgcggcggatgtgaccataggtgctcattgctttatcggtgcgcgctgcgaaatcggcgcaggcggttggctggcaccccgtgtaaccctgtaccacgacgtgcgtattggtgagcgtgtggtcatccagtcgggtgccgtgataggcggtgaaggctttggctttgccaattccaagggtatctggaacaagattgcccaggtcggcggcgtattgatcggcgacgacgtggaaattggtgtgaacacggctgtcgatcgcggggccctggccgacaccgtgatcggcaacggcgtgaagctcgacaaccagatccagatcgcccacaacgtacagattggcgatcacaccgccatggcagcctgtgtgggcatctccggcagcacccggatcggcaagcattgcatgctcgccggtggcgtcgggctggtggggcacatcgatatttgcgacaacgttttcatcaccggcatgaccatggtcacccactctattaccgagcctggggcctattcttccggtaccgccatgcagcccgcagctgaatggcgcaagagtgcagcacggttgaggcagctcgacgacatggctcgacgtctcaaacagctggaaaagcgtgttggggacgtgacccctggcggtaatgcttcatcagaaggctgataccatttccatatcaagtgtgcacagccgctagactgcctccttgatttgctagcggggcgtgcttttagttcgcccgcccccaatctttattacaggcttccccccgaaatgatggacatcaacgagattcgcgaatacctgcctcaccgttacccgttcctgctggtggatcgcgtagtggacctcaatgtcgaggaaaagcgcattcgtgcctacaagaatgtcagcatcaacgaaccgttcttcaatggtcactttcctgcgcatccgatcatgccgggtgtgttgatcatcgaggcgatggcccaggctgccggtatccttggtttcaaaatgctcgacctcaagcctgccgatggcacgctttactatttcgtgggctccgacaagttgcgtttccgcaacccggttactccgggtgaccagttgatcctggaagccaagttcatcagctgcaagcgccagatctggaagttcgaatgccaggcctcggtggatggcaagccggtgtgctctgccgagatcatctgtgcggaacgcaaactatgagtttgattgaccctcgcgcaatcatcgatccgtcggccgttctggccgccgacgttgaggtcggcccctggtcgatcatcggcgcaggtgtggaaatcggcgaggggactgtcatcgggccgcacgtgatcctcaaaggtccgacccgcattggcaaacacaatcgcatctaccagttctcctcggtaggcgaagacaccccggacatgaagtacaagggtgaagagacccgcctggtaatcggtgatcacaacatcatccgtgaaggcgtgaccattcatcgtggtaccgtgcaggatcgggctgaaaccaccctgggcgaccacaacctggtcatggcctacgctcatatcggtcacgacagcgtgatcggcaaccactgcatcctggtcaacaacaccgcgttggccggccatgtgcatgttgacgattgggcaatcctgtccgggttcaccctggttcatcagtactgccatatcggtgctcatagcttctccggcatgggcaccgccattggcaaggatgttccggcattcgtcacggtattcggcaaccccgccgaagcccgcagcatgaacttcgaaggcatgcgccgtcggggtttcagcgaagaagccatccacgccctgcgccgcgcctacaaggtggtttaccgccaggggctcacggtggaacaggcgttgacccaactgaccgagccggcagcgttgttcccggaagtcgcggtgttccgtgactcgatccaggcgtcgactcgcggcatcacccgctgatcatggctaatctgcgtatcgcgctggtggccggggaagcttccggcgacattctgggcgccggtcttatgcgggccctcaaagcccagcatcctgcggtggagttcatcggtgttggtggcccgctgatgcaggctgaggggcttacgtcctacttccccatggagcgtttgtcggtcatggggttggtcgaggtgctgggtcgcctgcgcgagctgctggcccgccgcaagttgctgatccagaccctgatcgaagaaaagcctgacgtctttatcggaatcgacgcgccggacttcaccctcaatatcgaactcaagttgcgccaggccggcatcaagacggtgcactatgtcagcccgtccgtctgggcgtggcggcagaagcgtgtgctcaagatccgcgaaggctgcgacctgatgctgacgttgctgccgttcgaagcgcggttctatgaagaaaagggcgtgccggtgcggtttgtcgggcacaccctggccgacactattcccttgcaggcggatcgcgcggccgcgcgtgccgagttgggcttgcccgacggccccttggttgcgttgatgccgggcagccgtggcggcgaagtcggtcgcctggcctcggtgtttttcgacgctgccgagcgtctgcaggccctgaagccaggcgtacgtttcgtgttgccctgcgccagcccgcaacgtcgtgcgcagatcgagacattgctggaagggcgcaacctgccgttgactctgctcgatggtcaatcgcacctggccctggcggcctgtgatgcggtgctgatcgcctcggggacggccacgctggaggccctgctgtacaagcgcccgatggtggtggcctaccgcctggcgccgctgacgttctggattctcaagcgcatggtcaaaagtccttacatctccctgcccaatctgctggcccagcgcctgttggtgccggagttgttgcaggacgatgcaacgccagaggcgctcgcgcaaaccctgctccccttgatcgacggcggcgaagaacagacccgtggtttcgacgctatccatcgcatactgcgccgtgatgcctcgaaccaggcggcagacgctgtattgacgttgatcggccagaaacaggaggcgatatgagtgcgcaaatgggcctggatttcagcctggttgccgaagcccacgaactggtggccggtgttgacgaagtcgggcgcgggcccttgtgtggcgccgtggtcacggcggcagtgatcctcgatccaaaccgtccgatcctcggcctcaacgactcgaaaaaactcaccgaagcgcggcgcgaaaagctctacgacgagatttgcgagaaagccctgagttggcacatcgcccgggccgaagttgaagaaatcgatgaattgaacatcctccacgccaccatgctcgccatgcagcgtgcagtggagggcctgcacatcacgcccaagctggcgatgatcgatggcaaccgctgccccagactggccatgccatcggaggcggtggtgaagggtgatagcaaggtgccggcgattgcggcggcctccatcctggcaaaggtcagtcgtgatcgtgaaatggcggctttcgaattgatctacccgggctatggcatcggcggtcataaaggctacccgacgcccgttcatctggaagccctggcacgtcttggccctacaccgatccaccgccgctcgttcgccccggtgcgtcaggcttacgaggcgcgggagagtctcagcgaggtgtagtcgcgaggctgatgtttttgccaaggcccggtacaatccgggccttgttgtctccacgtttctagacaggatcactatgccggcttcattcgttcacctacgcctgcacactgaatactccctggtcgacggcctggtacggatcaaaccgctggtcaaaaccctggtgggcatgaacatgcctgcggtcgcggtcaccgatcagaacaacatgtgttccttggtcaagttctacaagaacgccatgggcgccggtatcaagccgatctgcggcgctgacctgtggctgtccaacaaagacccggataaccccctgagccgtatcagcctgctggcgatgaacggcgtgggttatcgcaaccttaccgaactgatctcccgtggtttcatcgatggccagcgcaatggttcgatcatcatcgagcgcgaatgggtcgccgaggccagcgaaggcctgatcatgctgtcggccgccaaagagggtgagatcggtatcgcgctgctggggggcaacccccaagaagccgaagtactggccaaggaatggatgcaggtcttccccgaccgtttctacctggaagtccagcgtaccaaccggcccaacgatgaagagcacctgcacgccgccgtggccctggccgacaagctgggcgcgccgctggtggcgactaacgatgtgcgcttcatcaagaaggaagacttcgaagcccacgaaacccgcgtgtgcatcggtgaaggccgggccctggatgacccgcgtcgttcgaaaaactacagcgaagagcagtacctcaaaagcgccgatgaaatggccgagctgttcagcgacctgcccgaggccctggaaaactccgtcgagatcgccaagcgctgcaatatcgaagtgaagctgggcaagcacttcctgcccaacttcccgattccggatggcatgaccatcgatgaatatttccgcaaggtgtccttcgacgggctggaagagcgccttagcgttctgctgcccaaggacaccaccgaagattacgaggccaagcgccaggtctatgtggaccggctgaatttcgagctggatatcatcatccagatggggttccccggttacttcctgatcgtgatggactttatccagtgggccaagaacaacggcgtgccggttggtccgggccgtgggtcaggtgccggttcgctggtggcctatgtgcaaaagatcaccgaccttgatccgttggaatatgacctgctgttcgaacgtttcctgaacccggaacgggtttccatgcccgacttcgacgtcgacttctgcatggatggccgtgaccgcgtgatcgaatacgtggccgagaaatacggccgcaacgcggtcagccagatcatcaccttcggttccatggcggcgaaagcggtaatccgcgacgtggctcgggtgcagggcaagtcctacggcctggcggatcgcctgtcgaagatgatcccgttcgaagtcggcatgaccctggaaaaggcctatgagcaggaagaaatcctgcgcgacttcatcaaggtcgatgaagaagcggccgagatctgggagatggcccgcaagcttgaaggcgtggtgcgtaacgtcggtaagcacgcgggtggcgtggtcatcgcgccgacaaagttgactgacttttcgccgatctattgcgatgaagaaggcgacggcctggtcacccagttcgacaaggatgacgtggaggcggccggcctggtgaagttcgacttcctcggcctgcggaccctgaccatcatcgactgggcgctcaagaccatcaaccgcgaccgcgccaaggtgggcgaagaaccgctggacatcgctttcatcccgctggacgacaagccgacctacaccctgctgcaaaaagccgaaaccacggcggtgttccagcttgaatcgcgcggcatgaaagagctgatcaaaaagctcaagcccgactgcctggaagacttgatcgcactggtggcgctattccgtccaggcccgctgcaatcgggcatggtggacgactttatcaaccgtaagcacgggcgcgccgagctggcctacccgcactcggactaccagtacgaaggcctcaagccggtattggcaccgacctacggcatcatcctgtatcaggaacaggtgatgcagattgcccaggtgatggccggttacaccctgggtggcgcggacatgctgcgtcgagccatgggtaagaaaaaacccgaggaaatggccaagcagcgcggcggtttcattgaaggctgcgcgaccaacaatatcgacgccgacctcgcgggtaacatcttcgacctggtggagaaattcgccggttacggcttcaacaaatcccactccgccgcctacggcctggtgtcgtaccagaccgcctggctgaaagcccactacccggcgccgttcatggctgcggtactttcggcggatatgcacaacaccgacaaggtcgtgaccttgatcgaggaagtgcgcaccatgaagctgcgcctcgacgcgccggacgtgaacgcttcggagttcaagttcacggtgaacgatgaaggccgcatcatctatggcctgggcgcgatcaagggcgtcggcgaggggccggtggaagccatcaccgaagcgcgccaggacggtccgttcaaagacttgttcgacttctgcgcacgggttgacctcaagcgcatcaacaaacgaaccctcgatggcctgatccgcagcggcgcgctcgaccgtctcggcccgtatttccatgatgagcccaaggcttatcaggccaatatcgaccgtaaccgcgcggtgctgctcaccgccatggaagaagcgatcaaggcggccgaacagactgcccgcacccatgacagcgggcatgccgacttgtttggcgggttgttcgtcgaagacgatgcagatgtgtacggtaaccaccgcaaggccaaggaactgaccctcaaggaacgcctcaagggcgagaaagataccttgggcctgtaccttaccggtcacccgattgacgagtacgaaggtgaaattcgccgcttcgcccgtcagcgcatcatcgacctgaaaccggcgcgggatacccagaccgttgcaggcatgatcatcgccctgcgggtgatgaagaacaagaagggcgacaagatgggttttatcaccctcgacgaccgctcgggccgcatcgaagcgtcgctgtttgccgacgcgttccactccgcccagtcgttgttgcagaccgatgccatggtggtcgtcgaaggggaggtcagcaacgatgacttctccggtggcctgcgcctgcggatcaagcgggtgatgagcatggaagatgcgcgcaccaatctggccgaaagcctgcgtttgaaggtgaaaaccgaagcgctcaagggcgatcagctacgctggttgggcgacctgctcaaacgccaccgtggtgcatgcccggtgaccatggagtacaccggcaatgacgccaaggccatgttgcagtttggcgagacctggcgaattgatcctgcggatggcttgattcaagctttgcgtgaccagttcgggcgagacaacgtcttcctccaataccgttgacggtcagatatgtctgacctcggctaaacatttaatctcgacctaaacgcgcctctcccttaaggtagggcgcgaatagacaaccggctggccaggcacgccctggccgtcgacccaagacggacgcttatgaacccgaattttcttgatttcgaacagccgatcgctgacctgcaagccaagatcgaagagctgcgcctggtcggcaatgacaattcgctgaatatcggcgatgaaatctcccgcctgcaagacaagagcaaaacgctcaccgaagacatcttcggcaagctgaccagctggcagatcgcgcgcctcgctcgccacccgcgccgtccttacaccctggactacattcagcacattttcaccgagttcgacgagctgcatggcgaccgccatttctccgacgacgccgccatcgtcggcggtatcgcccgcctggacgaccagccggtgatggtgatcggtcaccagaaaggccgtgaagtgcgcgagaaagtccgtcgcaacttcggcatgccgcgtccagagggctaccgcaaggcgtgccgcctgatggaaatggctgagcgcttcaagatgccgatcctgaccttcatcgacaccccgggcgcttatccggggatcgacgccgaagagcgcaaccagagcgaggctatcgcctggaacctgcgcgtcatggcccgcctgaaaaccccgatcatcgccaccgtcattggtgagggtggctccggtggtgcgctggccattggtgtctgtgaccagttgaacatgctgcaatactcgacctacgcggtgatctcgccggaaggttgcgcctcgatcctgtggaaaaccgccgaaaaggcaccggacgctgccgaagccatgggcattaccgctgatcgcctcaaaggcctgggtatcgtggataaagtgatcgccgagccattgggcggcgcccaccgtgacccggctgccgccgctgcgaccatccgcgccgaactgggctcgcaactggcgatgctcaagaagctggataacgaagcgctgctggcccgtcgttacgagcgtctgatgagctacggcctctaagacccacgcaatacccaaatgtgggagggggcttgcccctcccacatttgctttgtgtatgcttggtgggcgtattacagatcagaggcggtaacttgctatgaaaccggctctgcccgccagactcttgcaaaccctggccccctggcgcagcgccccggcctggcacattgcgttctccggcggccttgattccaccgtcctgctgcacctcctggccaacctggccaaaaccgagaccctgccccccctcagcgctgtccatgtccaccatggcctgcaggctgccgccgacgcgtggcccgctcattgccagtcgatctgtgacagcctgggcgtgcctttgcgcgttatgcgtgtgcaggtgcggcccggcgccagtcttgagcgtgccgcccgtgacgcgcgttaccaggcttttaccgaggtggccggggcagggcaggtagtgctgacgggccagcaccgcgatgatcaggctgaaaccctgttgtttcgactgctgcgtggggctggggtgcgtgggctggcagcgatgcccgtgcagcgtcgattggctggtggcgacttggtgcggccgctgttgaatgtctccagggcggagttggaagcctacgcccacacgcatcagctccaatggatcgaagacccttccaacgcagattcgcggttctcccgtaattacctgcgccaccgcgtgcttcctgcactgatggagcgttggccccaggccgtctcaagcctggcgcgcaccgccgaacacctgagtgaagcccagggcctgctcgatgagctggcgcagatggacctgcaggccgccgaccaaccgtccccctttccctggctgcctctaccgtccttggcccttgcaccgctgcgcgagctttccgatgcccgtcagcgcaacgccctacgtaattggctgacgccgctgacgcgcctgcccgacagcgaccactgggcaggttggcattccctgcgcgatgccaaggtcgatgcacagcccctgtggcgcctggccgacggcgagttgcaccgtagcggcgaacgcatctggtggctgcctatcgcatgctcggaattttctgacgcatcgctgagctggcccgatccgcaaaacccactagagttacccggcaatggccagttgacgttcaccggcaaggtgcccgaagggccgctggagatccgctaccgccagggcggcgaaatcatcgaagtacccggtcgcggccggcgtgacttgaagcgcctgcttaacgaaagtggcctgccgggcttcctccgtggcagattgccgctgctgtatcaaggcccgcagttgctgggcgcgcccagccttgcgggactgtggccgtcggcaagtgatggctggcaattacattggatgccacagacctgcgatcaaggtttgagctgatagcgcctttccggtagactacgctcccttcttgatacaacttctgtggattcgactgaatcgcagcagttgccgattaccaagcagtctttgctgggcgattccaaaaaatgtgtagcgatcaacgtaccggtgtttcattgctggtctgtcaccacgcggcggtttttttgaaaggtgcactgtgattaatgcaggtgatcgggggcttcggccttccttcgctttccccggcggctcggaccgctttaacgcagacttctagggtttttcatgacgcgctacatattcgtcacgggcggtgttgtttcttcattggggaaaggcattgcctccgcttcattggcggccatcctggaggcgcggggacttaaggtcaccatgctcaagcttgacccctacatcaacgttgacccgggcaccatgagcccgttccagcacggtgaagtgttcgtcacccacgacggcgccgagactgacctggacctgggccactacgagcggttcatccgcacgaccatgacccagaacaacaacttcaccaccggccgtgtctacgagcacgtgctgcgcaaggagcgccgtggtgactacctgggtgcaaccatccaggtgatcccgcacatcaccgacgaaatcaagcgccgcatcatcaagggtgccggcgatgccgacgtggcgatggtcgagatcggtggcaccgtgggtgacatcgaatcccaaccgttcctcgaagccatccgccagctgcgtttcgaagtcggcgccaagcgcgcgatgctgatgcacctgaccctggtcccgtacatcgccaccgccggcgagaccaaaaccaagcctacccagcactcggtcaaggaactgcgttccatcggcctgcagccggacgtgctggtgtgccgctccgatcacccgatcgacatttcctcgcgtcgcaagatcgcgcaattcaccaacgttgaagaacgtgcggtgatcgcgctggaagacgccgacaccatctacaagatcccgggcatcctgcattcgcaaggcctggatgactttgtggtcgagcgcttcggactgcaatgcaacggcgcagacctgtccgagtgggaagccgtggtcgacgccaagctcaaccctgagcacgaagtcaccatcgccatggtcggcaagtacatggaattgctggacgcgtacaagtcgctgatcgaagcgatgagccacgccggtatcagcaatcgtaccaaggtcaacctgcgctacatcgactccgaagacattgagaaccagggcaccgccctgctcgaaggtgtggacgcgatcctcgtgccaggcggtttcggcctgcgtggcgtggaaggcaagatcactgccgtgcagtacgcccgtgaaaacaaggtgccttacctgggtatctgcctgggcatgcaagtggccgttatcgagttcgcccgtaacgtgctgggctggaaagacgccaactccaccgagttcgacagcaagagcggtcacccggtcgtgggcctgatcaccgagtgggaagatgccaccggcgcggtcgagacccgtaccgaagcctccgacctgggcggcaccatgcgccttggcgcgcaggattgcctgctggaagccggctcgctggttcacgattgctacggcaaggacgtgatcgtcgagcgtcaccgtcaccgctacgaagtgaacaacaacctgctgccgcagattaaagaggccggcctgaaaatctccggtcgctccggtgatggcgcgctggttgaagtggtcgaggcaccggatcatccgtggttcgtcgcgtgccagttccaccctgagttcacctcgacgccgcgcgacggtcacccgttgttcagcggtttcgtcaaggcagccctgacgcaacaccagaagaaggcgtaaccctgatggcccagaagatcattcgcgtaggcgacatcgagattgccaacgacaagcccatggtgctgttcggcggcatgaacgtgctggaaagccgcgacatggcgatgcaggtctgtgaagagtacgtcaaggtcacccagaaactgggtatcccttacgtgttcaaggccagcttcgacaaggccaaccgttcgtccgtgacctcctatcgcggcccgggccttgaagaaggcatgcggatcttccaggacatcaagcaagccttcggcgtgccgatcatcaccgacgtccacgagcctgaacaggctgccgtggtcgccgaggtgtgcgacatcatccagttgccggccttcctgtcgcgccagaccgacctggtcgtcgcgatggccaagaccggcgccgtgatcaatatcaagaaagcccagtttctcgcaccccaggagatgaaacacatcctgaacaagtgcgtggaagcgggtaacgaccagttgatcctctgcgagcggggttcgagcttcggctataacaacctcgtggtggacatgctcggtttcggcatcatgaaacagttcgaatacccggtgttcttcgacgtgacccacgcgctgcaaatgcccggtggtcgcgccgattccgcgggcgggcgccgtgcccaggtgctggacctggccaaggcaggcatcagccagtccctggccggcctgttcctggaagcccacccggacccggacaacgccaaatgcgacggcccatgcgccctgcgcctggacaagctggagccgttcctggcccagctcaagcagttggacgaactggtcaagagttttccgacggtagagaccgcgtaagcgtcgtttctccggtagactttcccacgctttacgctcaggcctgcgggcctgggccttgtcgcctgcaagcctgccccgttgttccacccttgcggtcggtcaaaagattcccttcagctgcgtcgttttcgtcaactttggagtgtttacaacaatggcaaaaatcgtcgacatcaaaggtcgtgaagttctcgactcccgtggcaaccccaccgtcgaagccgacgtgcttctcgataacggcatcatcggcagcgcctgcgcgccgtccggtgcttctaccggttcgcgcgaagcgctggaactgcgtgatggcgacaagagccgttacctgggcaagggtgtactgaaagctgttgccaacatcaacggcccgatccgtgacctgttgctgggcaaggatccgctggaccagaaagccctggaccacgcgatgatcaagctcgacggcaccgaaaacaaaggcagcctgggcgccaacgccatcctcgccgtgtccctggccgctgccaaggccgccgcacaggaccaggacctgccgctgtacgcgcacattgccaacctgaacggcaccccgggtgtctactcgatgccggtgccgatgatgaatatcatcaacggtggcgagcacgccgataacaacgtcgacatccaggaattcatggtacagccggtcggcgccaagtccttctccgaaggcttgcgcatgggcaccgagattttccatcacctcaaggctgtgctgaaggcccgtggcctgagcactgcggtgggtgacgaaggcggttttgcaccgaacctggcgtccaacgaagatgcactgaaagtgatctccgaagccgtggccaatgctggctacaagctgggcaccgacgtgaccctcgccctggactgcgcggccagcgagttctacgaggacggtaagtacaacctgtccggcgaaggccaggtgttcaactccgaaggtttcgctgaatacctgaagggcctgacccagcgctacccgatcatctcgatcgaagacggcctggacgagtccgactgggacggttggaaaatcctcaccgacaagatcggcgagaagatccaactggtgggcgacgacctgttcgtgaccaacaccaagatcctgaaagaaggcatcgataaaaagatcgccaactcgatcctgatcaagttcaaccagatcggcaccctgaccgaaaccctggaagccatccagatggccaaggctgcgggctacaccgccgtgatctcgcaccgctccggcgaaaccgaagactcgaccattgccgacctggccgtgggcacctcggccggccagatcaagaccggttccctgtgccgttccgaccgtgtttccaagtacaaccaattgctgcgtatcgaagagcaactggctggcaaggccaagtacaacggtcgcggcgagtttcgcggctgatcgctagttgatggtgaaacatggtaaaaagtcggcggattgcgtcggaaaactcacgacagtgtggatttcggcgctaatctgatggctatcaagcacaagcctggtttttccaggcttcgtgctatcagttgctgcaaaagttttgcatggcggtcttttttcactggatacccgatattcgatgcgcagtcccaattggttgttcctcgtcttgctcttgttgctggctggcctgcagtaccgcctatgggtgggtaatggcagctttgcgcaggtaaaagacctgacccagcaaattgccgaccagcacgccgaaaacgaacgcctgctggagcgtaaccgcgtcctcgatgccgaagtgcttgagctgaaaaaaggtacggagaccgtggaagagcgggctcgtcatgaattgggcatggtcaaggagggcgaaaccctctaccagttggcccaatgagtaaccgtttgccggccttctgggccgtgattcctgccgcgggcgtcggtgcccgtatggccgcggaccgtcccaagcaatatctgcaactgggcgggcgcactattctcgaacacagtcttggctgttttcttgaccatccagaccttaaagggttggtggtcagccttgctgtcgatgatccttactggcccaacctgccttgcgccaacgacccacgcatcgtgcgtgcggatggcggcgacgagcgttcggggtctgtgctcaatgcgctgctgcaactcaatgccctgggcgccagcgatgacgattgggtgttggtgcacgatgcggcacggccgaacctgagtcgtgatgatctcgacaagttattaagcgaactgttgaacgatcctgtgggtggtctgttggccgtgccggcccgcgacactctcaagcgcgtcgacaagcatggccgcgtggtcgagaccgttgatcgcagcttgatctggcaggcttatacgccgcagatgttccgcctgggtgccttgcatcgcgcgttggctgacagcctggtggcggatgccgtcatcaccgacgaagcctctgccatggaatggtccggccaggcgccgcgcctgatcgaagggcgctcggacaatatcaaagtgacccggccggaagatttggagtggctgcggttgcggtgggctaaccgcaggtaattcgcgataccgtgtcgaccccatcgggggcaagccccctcccacattgaaatgcattccaagtgtgggagggggcttgccccctatgaggcccctccaaacaaccaacagtcaactgctgtactccggcctctcagccaacccctccttcaagaaatccaccaatttcctgaccttcggcgacaaatgcctttgctgcggatacaacgcccacaccgccgtattcggcggctgatgcgcctccagcaacgacaccagcgccccactgtgcagatgctcgagcacgtaatagtctggcaactggcacaacccgacgccctgtagcgccgcatccaacaccgcttgcccactgttgcagcgccaatttccctgcacgcgctgggaaaactcccgcccgtcctgggccagttgccagatatccgagctgccgatcaggcagttatgccgactcaattccgacaagctatgtggccgaccataccgagcgaggtaggacggcgacgcacacaggtacatgcgtcgaggtgcgaggcggctggcgaccatgcgcgaatcctgcaagcgccccaggcggatcgccaggtcgaggccttcatgcaccaggtccagttggcggttgctcagttcgatatccacccgcaactgcggatacagccccatgaagcgtgtcaccagcggcacgataaagcgctcgccatatgccacggcacaggtcatgcgcaacatgcccttgggctcgctggtgagatcgcccaccgcacgcagcgcttcctcacgcccgtcctgcaggcgttggcagtgttgcaagaaggtctggccggcctcggtcagggtcaccttgcgcgtactgcggtacagcaaccgggtttgcaggcgttcttccaggcgcgccacctgccggctgatatgggaagacgacacccccagccgttccgccgccgccgtgaactggctgcattcggccactgcgacaaactcatcgataccttcccagcggttttcaagcatgtcgattatccccatgcagcaataaagttttgcttttgcctggattattcatcagctagccatgttttacactcgtcgcctcagtttttaaccccgatggagaaacccggatgatcaagtcccgcgccgccgtagccttcgaagccaagaagccccttgagatcgtcgaagtggatgtcgccatgcccaaggcgggtgaagtgctgttgcgcgtggtcgcgtccggcgtgtgccataccgacgcctacaccctgtcgggcgccgacccggaaggcatcttcccgtcgatcctcggccatgaaggcggtgcggtggttgaggcgatcggtgagggcgtgacgtcggtagccgtgggcgatcacgtcatcccgctgtacaccccggaatgcggcaagtgcaagttctgcctgtcgggcaagaccaacttgtgccaggccatccgttccacccaaggcaaaggcctgatgccggacggcaccacgcgtttctcctacaaaggccaaccgattttccactacatgggcacctcgaccttctccgagtacaccgtgctgccggaaatttccgtggccaagattcctaaagaagccccacttgaaaaagtctgcttgctcggttgcggcgttaccaccggcatcggtgctgtgatcaacaccgccaaggtcaagccaggcgataccgtagcgatcttcggcctcggcggtatcggcctgtcggcagtgattggtgcggttaaagccaaggcaggtcgcatcattgccatcgacatcaacccggccaagttcgaaatcgccaagcagctgggtgcgaccgattgcatcaacccgaaagactacgatcgtccgatccaggacgtgatcgtcgacctcaccgacggcggcgtggacttctccttcgaatgcatcggcaacgtgcaactgatgcgcgccgccctcgagtgctgccacaagggctggggcgagtcggtgatcatcggcgtggccggtgccggccaggaaatcgctacccgcccgttccagttggtgaccggtcgcgtctggcgcggttcggccttcggtggcgtacgtggccgctccgaactgccaagctacgtggaaatggcccagaccggcgagatcccgctggacaccttcatcacccacaccatgggcctggaagacatcaacaaagcgtttgacctgatgcatgaaggcaagagcattcgtaccgtcatccacttctgaggttcgccatgagtctggaaaacctgtcgtgccagaagagcttcggcggctggcataaacgctacaagcatcattccgatgtgctcggttgcgacatgaccttcgccgtttacctgccgccgcaagcggagcagggcggcaaattgccggtgttgtactggctgtcgggtctcacctgcaccgatgagaacttcatgcagaaggccggcgcccagcgcatggctgccgagctggggttgatcattgtggcgccggacaccagcccgcgtggtccgggtgtgccgggcgacccggacaacgcgtgggatttcggtctcggcgccggcttctatttgaatgccacccaggaaccctgggccaagcactatcggatgtatgactacgtcgtgcaggaattgccggcgttgatcgaagggcatttcccggcgtcggataagcgcggcatcagcggccactccatgggcggccacggtgcgctggtgtgtgccttgcgtaaccctggacgttacctgtcggtgtcggcgttttcgccgatcaacaacccgatggattgcccatggggccagaaagccttctcccgctacttgggtgaagagcgttccaagtggcgcgagtgggacacctgtgtactgatcggcgaagcctcggaaaagctgccactgctggtggaccagggcgaccgcgacgatttcctcgccgtgcaactcaagcctgaagccctgcaacaagcggccaaggcagccaaccatccgctggaactgcgcctgcaacccggctacgaccacagctacttctttatcgccagcttcatcgaagaccatttgcgacaccatggccgtgctttgctcggttaatgtgaggcaaaagtaggtagaatcacgccctgaattaaatcggggcgtttttttatgcgtattggccacggctacgatgtgcaccgtttcgccgaaggcgatttcatcaccctgggcggcgtgcgtattgcacaccaccatggtttgctggctcattccgacggcgacgtcgtgttgcatgccttgagcgatgcgttgcttggcgcagcggcattgggcgatatcggcaagcactttccagacaccgacccgactttcaagggcgcggacagccgtgtcttgttgcgccatgtggttggcctggtccatgccaagggctggaaggtcggcaacgttgacaacaccatcgtggcccaggcgccgaagatggccccgcatatcgagtcgatgcgcgcgctgattgccgccgacctgcaaattgaattggatcaagtcaacgtgaaagccaccaccactgaaaagctcgggttcaccggccgtgaagagggcattgccgtgcactccgttgccttgttgctgcgcgcatgaatgacctgcaactgctgggcccgcgagcctatggcgaggccttgggcagcgcggtactgaaggcgacggccgaagacttccaggtcgacgaggtgctggacattccgctgaccggtgaaggcgaacacctgtggttgtgggtggaaaagcgcggcctcaataccgaggaagctgcgcggcgtatcgccaaggcggccggggtgccgttgcgcaccgtcagctatgccgggctcaaggatcgccaggcgttgacccgccaatggttcagcgtgcaactgccgggcaaggccgacccggacatgagcgcggcggagaatgacacgctcaagattctcaagaccggccgccacaagcgcaagctgcagcgcggtgcgcattcggccaatgggttcactttgcgcctgacgcagttggccggtgataccgccgccatcgatgcgcgcttgcaacagattgcccaacacggcattcccaactatttcggtgcccagcgctttggccacaatggcggcaatgtcgtggacgctcgcgagtgggccgcccgcaaagccttgccggagcagcgcaatgtgcgttcacggttgctgtccaccgcccgcagctttttgttcaacaaagtgctggccgcgcgcgtggccgatggttcgtggcaacgtgcccaggtcggcgacctgctggcgtttaccgacagccgcagttttttcccggctggcgaagcggaatgcagcgacccgcgcctggccattctggacctgcacccgaccgggccgcagtggggcgagggcgactcgccagccagtggtgcaaccttcgagctggaacaggcggttgccgctggtgaagccgacttgcgtgattggctggtgaatgccggcatgagccaggaacgtcgcattcttcgactgcccattggcggtttgacgtggcattatccctcgctggacattctgcaattggaattcgtcctgccggccggatgcttcgccactgtgttggtgcgcgagcttgttgatctggtgccggtggggcagacggacaacccatgcgtattctgatatcaaacgatgacggtgccaccgcacccggtcttgccgcgctctatgctgcgctgcaggattatgccgagtgcgtggtggttgcccctgaccaggacaagagtggcgccagcagttcgctgacgctcgaccgtccgctgcacccgcaagtcttggccaatggctttatcagtgtgaacggcacgcctaccgactgtgtccacctggcaatcaacagcctgctggaccaggcgccggacctggtggtgtcgggcatcaacctcggtgcaaacctgggggatgatgtgctgtattccgggaccgtggcggcagcccttgaggggcgcttcctgggccgtaccgggttcgccttttcgtttgcctcgcggcaactggataacctggcaaccgccgcgcatttcgcgcgcaagctggtggaggcccatggctctctggacctgccaccgcgtacggtgctcaacgtcaatattcccaacctgcccctcgatcatattcgcggcatcaagctgacgcgcctgggccatcgcgcccgtgcggcggcgccgttgaaggtggtcgacccgcgtggcaaggaaggctattggatcgcagcggcaggtgatgctgaagatggtggtgaaggcacggactttcatgcggtgatgcaaggctatgtgtcgattaccccattgcaatttgatcgcaccttcagtgatgccttcagtggtctcgatggctggctggaggggctgcgctgatgggccgtgaacaagacgacttgctgcgccggggcatcgggatgacgtcccagcgtacccgtgaacgcctgatccagcgcctgtacgaagaaggtttgtccaacgcccaggtgctggaagtgatccggcgtacgcctcgccacctgtttgtcgatgaagccctggcccaccgtgcctatgaagatacggcgctgcccatcggccacaaccagaccatctcccaaccgtacatggtggcgcgcatgagcgagctgctgctggcggcggggccgttggacaaggtgctggaaatcggcaccggctccggctaccagactgccgtgctggcgcaactggtggagcgggtgttctcggtcgagcgcatcaaggtgctgcaagaccgggccaaggagcgcctggtggagttgaacctgcgcaacgtggtgttccgctggggggacggctgggaaggctggccggcgctggcgccttacaacggcatcatcgtgaccgccgtggccaccgatgttccgcaagcgttgctcgatcaacttgcccccggcggacgcctggtgatcccggtaggctccggcgaagtgcaacaattgatgctcattatccgtgaggatgaaggcttttcccggcatgtgctgggggccgtgcgttttgtgccgttgctcaatgggccgctggcctgatcatttgttcgcgggcagtgaattctgttggcggggatgtgtcttacggcggggtctatcgagtcaacatgatcgggagtcggaattaaacgcgatgaatgtttcgtttccggcgtgtgacggtaaaactccaatgcccagttatacttgcgtcatatttcaagcctgatacaggcattcatgttcagccaccacaaagggagcggcgggtgagtctcacaggtcttgcgcagggtatgagtaaaacaagctttcatcgactggtgcttggcctcgtcttcagttccgtgctggtcggctgctccagctcgccaagcagcggcgcacgggtggtggaccgtaataatgccgtgccgcaaaagccgacggtgaccaccgggcaatacgtggtgcgcaagggcgatacgatgttctcgatcgccttccgctatggctgggactacaaggcgctcgcagcccgtaacaatattcctgtgccctacacgatacatcccggtcagacgattcgcttcgacggccgtaccggttctgcgcctacgacagttgtgacaaacactggatcttcgccgtcgtcctccagcaaaaccaccatcattacccgccctgcaggcaccgccgcacctacccctgcaagcaagccggcacccgcgccgttgccacctgccgggcctgcgccgaccggctggggatggccctcaaacggagtgttaattggaaaattctcttcaaacggtagtttgaataaaggcattgatatcgccggagatttgggacagcctgttttagctgcgtctgatgggacagtggtgtacgccgggagtggtttacggggctacggcgagctggtcatcatcaaacacagcgacacctacgtcagtgcttacggtcacaaccgcaggctgttggttcgggaggggcagcaggtcaaagtcggacagacaattgccgaaatggggtcaactggtacagaccgggtgaaactgcactttgagattcgccgtcaagggaagcctgtagatccgctgcaattcctaccccgtcgttgatgtgttgcacagcctgttccctcacgtagaaggaacaggctccagcgttgccaaggataaaggcgccgcttgagcttgaggtcgaactcaccaaaggactataacaatggctctcagtaaagaagcgccggagtttgacatcgacgatgaggttctcctgatggagaccggtatcgctacggaatcgatgtcgaatgagggacctgctgtaccttcagttcgcaccaaatccaagaactccaccgcgttaaagcaacacaagtacattgactacactcgggcgctcgatgcgacccagctgtacctcaatgaaatcggcttttcccctctgttgactcccgaagaagaagtccattttgcgcgcttgtcgcagaagggcgatccggctgggcgcaaacgcatgattgaaagcaacctgcgcctggtggtgaaaatcgcccgacgctatgtcaatcgtgggctgtccctgttggacttgatcgaggaaggcaacctgggcctgatccgggcggtggagaagttcgaccctgagcggggcttccgcttttcgacctatgccacctggtggattcgccagaccatcgaacgggcgatcatgaatcagacccgtacgatccggttgccgatccatgtggtcaaggagctcaacgtctacctgcgggcagcgcgtgagcttacccaaaaactcgatcatgaaccttcgcccgaagaaatcgccaacctgctggaaaaaccggtaggggaggtcaagcgcatgctgggccttaacgagcgtgtgtcttcggtcgacgtctcgctgggtccggattcggataaaaccctgctggacaccctgaccgatgatcgtcctacggatccttgcgagctgttgcaggatgatgatctgtcccaaagcattgaccagtggctgtcggaactcacggacaagcagcgcgaggtggtgattcgccgcttcggcctgcgcggccatgagagcagcaccctggaagacgtaggcctggagatcggcctgacccgtgagcgggtgcggcagatccaggtagaagggctcaagcgcttgcgtgagatcctggagaagaatggcttgtcgagtgagtcgttgtttcaataacgaattggcttgaatgcttgaatgtgggagggggcttgcccccgatagcgatggttcagtcaaatctgtattgactgacacactgcaatcgggggcaagccccctcccacattggtttatgccgtatcttatttgcagatagggccaaatcccaggcataaaaaaaccccgcttttaagggcggggtcttttcgactaagtcagtacaagttagataacttgaacttcttcagcttgcatgcctttctgaccgcgggtagcgatgaaagaaacctgttggccttctttcaggcttttgaagccgtcggattggatagctttgaagtgaacgaacaggtcgtcaccggattgtggagtgatgaagccgaagcctttttcatcgttgaaccacttaacggtaccagtttggcgattagacatggtgtatctccttggacaaagttaactgcgactcaggaaaagccctggccgagactgagtgcaaagagcaggaaaaattcttggagatggttggatcgaaattcaacatatcgtgtagagattctcagtgacacaagcagcacagtggcgccaccttaaccctttttccggaacgtgccaatggtatttccgaaggtttctccattttcgtgactggcggtggtatttgcggtcaccttgcacggcaatatgggtcccggccccgctggctgtggcttatagcagcaggcgcgttcatcaagaaaagccgcgtggcctttgaaccccaacgccggccccggtaagatgccccacagaatttttccacctcgctattcaggacacccgccatgagcatcaaatcggacaagtggattcgccgcatggcgcaagaacacggcatgatcgaaccgttcgtcgagcgccagatccgtggccaaggcgatgccccggtgatttcctacggcgtttccagctacggctacgatgtgcgctgcgccgatgagttcaaggtgttcaccaacatcaactcggcgatcgtcgatccgaagaacttcgacgaaaagagcttcgtcgacgtcaagagcgacgtatgcatcatcccgcccaactccttcgccctggcgcgcaccgtggagttcttccgtatcccgcgtgacgtgctgaccatctgcctgggtaaaagcacctacgcgcgttgcggcatcatcgtcaacgtgacgccgcttgagccggagtgggaaggccacgtgaccctcgagttctccaacaccaccaccttgccggcgaagatctatgccaacgaaggtgtggcgcagatgctgttcctgcagtccgacgaggcctgtgaagtgtcctacaaagaccgtgccggcaagtaccagggccagcgcggcgtcactctcccacgcgcctgatcgaaaggtcttacacgcaaagggaattagtctgcggaaagtgactctatctaggtgtactgcctcggcgcgtgtaaaacgcgccgggccacgcttgaggagtaccttatgaagctcgacccgcgaatcagcgcagaacttgcccggcttgaacccaaccagattggcgttctggcctggtccttgatggccgaccccgcatacgggggcggcatccccggccaacctgagccggactacccccaacccgccgaacccggtgagccgaccctgccggacgagccaccacccgcacccgttgcctgatacctagcccacaggccacacctcctgatcgccgaccacaaagagtcggtggtcatcggcctgctccaccgcaaatccaccggtaaacgcgccaaacgccggcaacaagctgacccgcgtcccgatctgaaagcacggcagccgcaggctttgccggcccttgccacgcaagcgatacaccggatgcacatgccccgccagcacgtggtggctggggtgggcatccggttcgtgctgcaaggcaaaggggcccatcagcagcggttccggcaccacttcaatcttcaggtcgggcggtgggtcaccggcgcgtttatcgtgattgccgcgcaccagggtcaggggcaacgagggatgacgctcgcgccaagcccgcaacgcgcccagtgtgccgctggcgtgggagccggggccatgcaggaagtcgccaagaaagatcacctgcgcgcacccatgggtagcgagcagccggtccagccgctcaaggttggcagtggtggtcccttgcggcaccggctgccccaggctgcggtacgccgaagccttgccaaagtgcgcatcggcaatcaacaggcacccgcgcgcaggccagtagatcgccttgtctgccagcaaccacaattgctcaccttccagcgttatcgaacagaccatcagcgcttcccgttatccgcgaccttttccaggtccttgaccattcgtgcaatgcgctccgagagtttttccgaactcatgctttcgcgcatccgctcgaccagcagcggaaaagccaggggagtcggccgttcgatcaggtgcaggtccagtttcagcgccgacagatgacgcaacgtcgcttccaagcgacgaatatccaattcatcgcgcaggacttcttccccggcttgggtcagtaatcggttctgtgggtcatattgcttgaacacctcgaagaacaaaccgctggacgcctgcacctgccgcgtacttttcggtgcgccgggatagccggcgaacaccagcccggcaatgcgtgctatctcgcgaaagcggcgcagggccagttccccggcgttcaggctggccgccacgtcttccaacaggttttcagggctcagcagcgcctcattcaataatccgggccaatccacaggcgtggcgctcaataactccagcccgtagtcattcacggcaatcgaaaaggtcactgcctgcccctggctcacccgccacgccaacagactcgccagccccaggtgcacctggcgcccggcgaagggatagagaaacaggtgccagccttcccgggatttcagcgcttctgccagcagatgctcgcgcgtcggcaggccggaccagcgcaactgcgtctgcaagaggggttgcaccgcgcgcatctccgggcctttaaagtgcccgtgcgccgccgcatcaaaacgctccaccaccgcctgggccagctcgttggaaagcggcatgcgcccgccattccagcgcggcacggcggcttttttggcgctgctgcggcgcacgtaggcggtcatgttttccacacgcaccagctccagcaggcgcccggcaaacaggaaaccatcgccgggcttgagccgcgcgataaaaccttcctcgacactgcccaggttcttgccgccaccgcccttgctccagtacttcaagtggatgctcgcgtcactgacgatggtgcccacgctcatgcgatgacggcgcgccaggcgggcatcggggacgcgccagatgccctgttcgtccggctccacgcggcggtagtccggataggcggtcagcgacagaccgccatggcgcacaaaccccagcgcccacgcccagtctgcgtccgtgaggtcgcggtacgcccaggccccgcgtacttccgccagcaacgcatccggcgtgaacccgccgcccagcgccatgctcaccaaatgttgtacgagtacatccagcggtttgtgcggcgattcccgcgcttcgatgcgtcgctgggcaattgcatcctgggccgccgccgcttccaccagttccaggctgtgggtcggcaccagcgtcacccgcgagggccgccccggcgcatgccccgagcgcccggcgcgttgcatcaggcgtgcaacacctttggccgagccaatctgcaacacccgttccaccggcaggaagtccacccccaggtccaggctggaggtgcacaccacggccttgagttggccgtccttcaacgcccgttccacccagtcgcgggtctctctggacaatgaaccgtgatgcagggcaatcaccccagcccagtcgggccgggcgtccagcaacgcctggtaccagatttccgactgcgcccgggtattggtaaacaccaggcaactgctgctgctttcgacctcggccaccacctggggcaacatcttcaagccgatatgcccggcccagggaaagcgctcggcaagcggcggcagcaaggtgtcgaccttcagctctttggccgtttgcccctgtacattgatcccgtcgccttgtgggaccaacacctccaaggcgtgggattgattacccagggtcgctgaaatgccccacaccatcaaacccggatgccagcgccgcagccgcgccagcgccagttgcaactgcacgccgcgtttgttgccgatcaattcatgccattcatcgacgatcaccatgcgcacgtgtgccaggctcacttcgctgtcggcgcgggccagcatcagggtcaggctttccggggtggtcaccagggcggtgggctggcgccgtgtctggcgggcgcgctcgctgctgctggtgtcaccggtgcgcaggccgacgctccagggaatctgcagggcttccagcggtgcttcgagggcgcgtgcggtatcggccgccagggcccgcatgggcgtgatccacagcaccgtcagcggttcagcgggcggtttgcgtttacccgtcacgggcgggcgagtgatggcgaagcgattgagcgccgcgaaccatagcgcgtaggtcttgccggcgccggtgctggcatgcagcaatcccgactgaccgcccttgactgccgcccatacctctttctgaaaagcgaacggcttccagcctttggcggcaaaccactgtttggcgaagtcgatgggttttgccatggggcggcgcaactctggaaggtctattccacagaccttccagcgcgcccaaaggtttacttcaaattgccactcaggaactgctgcaagcgctcgctcttcggattgcccagcacgtcctcaggcgcgccttgttcctccaccaggccctgatgcaggaacagcacctggctcgacaccttgcgtgcaaagctcatctcgtgggtcaccatgatcatggtgcggccttcctcggccaggccttggatgaccttcaatacttcacccaccaattccgggtcgagggccgaggtgggttcgtcgaatagcatgacctccggttccatcgccagggcgcgggcgatggcgacgcgttgctgctggccgccggacaggaacgcggggtattgatcggccacgcgcgccggcaaacccaccttgtccaggtagcgacgggcgcggtcttcggcgtcctttttgctgcaacccagcacccggcgcggggccatggtgatgttttccagcacgctcatgtggctccacaggttgaagtgctggaagaccatggccaggcgcgtgcgcaagcgctgcagttcggcgtcatcggccacgcgcatgccgtggcggtcactgaccatgcggatcggctggccgtcgagggtcatggcgccgtcgttgggcgtttccaggaagttgatacagcgcaagaaggtgctcttgcccgagccgctggcgccgatcaggctgatcacgtcgccggtcttggccttgagcgaaacacctttgagcacctcattgtcgccatagcttttatgcaggccttcaacggtcaatttgtacatggggcatgcatcctcaaggcgaaagtagatagccgctgcggtaggcctcggtgccagcgacatggccgatgaccatcccggcagtggccatgcggcgcagcgaacgtgcgtaaagcaggccggccttttggcagtgcacgggcgttacgcggtcggaaatggggtcgatgatttcggcgatcagttgcccggcttccaggtattcacccggcagggcgctgaacaccagcaggccgcccaccggggtcgccaccggttcaacgccggccagcggcgtggccgggtagggcaggtcgggcagcggtgcggcatcgcctgcaatggcgccgaagtgaatcaggtaatcgatgatcgcctggcagtcgaggctcgccaggccatggttgacgtcaccctggccgcgcagctcgacggtgaccgaaaagctgcccatggggatcgggaaacgctcgccgaaacgttgctgcaactgccaccacaccagggtgaaacactcatcgaaggattgcccgccggaatcggtcgcgagcaaattggcctccgaaccgatatagcgcgccaacggctccacctgcggccaggcctcgggggtggtgtacaggtgcgccaccgcttcgaagtcgcagtgcaggtccagcaccatatcggcatcgcaggccaggcgttgcagcaccaggcgttgggattgcagttgggtctcggcacgctgcgcggcgagggtggaggacagcgcggagcgcaccagctcgacgtttcgccggggatcgtcccccagccgttcctcgatctggtcacccaccgcttcactgaggtcgacaaacaggcgattaaagttttgcccgctctccagctcgtagcggcccagcgggatatccatcaacacctgctccaggcccaccggattggcgatgggcaccagcacgatctcgctgcgcaggcgcccggctgctgccaactctgccaggcggagcttgaggtgccaggccaccagcatgcccggcagctcatcggcatgcagcgatgactgaatgtagatcttgccctcggcctgttccgggccgaagtgaaaactgtgaatctgccgcgccgtgcctggcaccggcgcgatcagctcatggacgtgatgccgcatgaatgctcctgaaaatgaaaagctgcttaatggctcggcccgaggaaagccagccagcggcgctctgccagacgaaacagaccgaccagggcaaaggtcacggtcaggtagatcagcgcagcgataccgaatgattgaaaggtcatgaaggtagccgagttggcatcccgcgccactttgaggatgtccgggatcgtcgcggtgaaggccaccgtggtcgagtgcagcatcaggatcacttcattgctgtagtagggcagcgaacgacgcaacgccgacggcatgatcacataggcgtacaacttccagccgctcaagccgtaggccttggccgcctcgacttcaccatgggccatgctgcggatcgccccggcgaagatctccgtggtgtaggcacaggtgttgagagcaaacgccaggatggtgcagttcatcgcatcgcggaaaaacgcatccagcaacggctgctcgcgcacggcggcgatgctgtagatgccggtgtagcagatcagcaactggatatagagcggcgtgccccgaaacaggtaggtgtagaactgcaccggccagcgcaccaggcgcttgcgcgacacacgggcgatggacagcgggatcgacaccagaaagccgatgaccagggctgcggtgagcagccacatcgtcatggccagccccgtgatgtgctggccgtcgctataaaggaaggggcgccagtattcctgcaagagttcgatcatcgtacggcctcccgggcgccggcggagtagcgacgttcaaggcggcgcaggacaaagttggacgcgctggtgatcaacaggtagatcagcgcggcgagtacgaggaaatagaacagctggtaagtgctcttgccggcgtcctgggccgccttgaccaggtcggccaggccgatgatcgacaccagggccgtggccttgagcatcaccatccagttattgccgatacccggcaaggcaaagcgcatcatctgcgggaaggtcacgtagcgaaaccgctggccgcgcttgagtccataagccgtggcggcttccagttggccgcgcggcaccgcgaggatcgcgccacgaaaggtctcggtgaagtacgcaccgtagataaagcccagggtgatcaccccggcgctgaatgggtcgatctcgatgtattcccattccatgaagtcggtgaggccggtcaaccaggtttgcaggctgtagaaaatcagcagcatcagcaccaggtcgggcactccgcggatcagcgtggtgtagagctgggcggggatgcgcaggaagggcaggctggacagtttggcgctggcgccaatcagccccagcaatacgctgacggccagcgacagcaccgacaacttgatcgtcatccaggtgccttgcagcaacagcgggccgaaacccttcaggctgagcgcgctcaacccgagggtttgcaacaattcttcgaacataaatcaggacctatggcgataaaaaagcgcccctccaggggaagggcgctccaggcattatttgccgctgtacaggttcagatcgccaaagtgtttcttctggatggtggcgtaggtgccatcatcgtgtaacgctttgatacctttatccaaaagcgccttcagctcagtgttaccttttttgataccgacggcggttttcgacggcagcaatgggtcgtcgatggccgcgctgacttcataaccggcgcctgccggcgacttcaggaagcccagttcggcttgcagcatgtcctgcacggatgcgtcgagacgcccggaggtcaggtcggcatacacttggtcctggttggcgtaggccttggtggtcacaccggctttatccagtacggccttggcgtaggcttcctggatggtgccttgctcgtagcccacggatttgcccttgagggactcaggcgtcgagtagccagcacctttcttgaacaccagcgaggtcgggccggagaacagttcgctggagaagtcgatggccttttcacgcaccggggtcacggtcatggacgaaatcacgccgtcgaacttgttggccttgaggcccggaatcatgccgtcgaaatcactttctacccacttgcactttactttcagctcggcgcagatcgcattgcccaagtcgatatcgaagcccaccaggctgccgtcggcggccttggattcgaatggcgcgtaggacggatcgacaccaaaacgcagttccttgtattccttggccgtggctacacccgcggccatgcacagagccagtgcagaaagggtcagcaatgcttttttcattatgtaatccctggaaaccaagataagcgcttgtggcgcgtttaggactgttactgaacggtgtcagacggatcacaagtagcaatttctgcaccatagttccgaatgtagttccgaatgagcgttttaaaaggtgggatgagggagatctgagtgtaggagatgcccgaaaatgggcgctgaaaaatgagcgcaccatttcgggtcataaagaaatttaaatgtgggaggtgtcaggtaagcaggtcttgcagggtggcaaggctgtcggcctcatccaccgccttgtcctgccgccagcgcaacatccgcggaaaccgcacggcaattccgctcttgtgccgcttggacaaggcaataccctcgaatcccagctcgaacaccatgctcggtgtcacactgctcaccgggccgaatttttccacggtggtcttgcgcacaatcgcgtcgaccttacgcatttcttcgtcggtcaggccggagtaggccttggcaaacggcaccagcgtgcgttcgctgccggccgggccgtcccacaccgcaaaggtgtagtcgctgtagaggctggcgcggcggccgtggcctcgctgggcgtagatcaacaccgcgtcgacgctgaacgggtcgaccttccacttccaccacacgcccatgtccttggtacggcccacgccgtagaggccatcgcgggccttgagcatcatgccttccacgcccaggctgcgcgaggcttcacgctgttcagccagcgcttcccaggtggttgcggtcagcaacggtgaggcgagcaatactggttggttgcactgggtgaccacctgctcaagctgggcgcggcgctcggcctgggtgtggttgcgccagtcgtcgccccgatgttccagcaggtcgtaggcgaggaccgcgaccggcgcatcctccagcactttcttgctcaacgtcttgcggccaatccgttgctgcaacagggcgaagggttgcaccgcgtccttccacaccacgatctcaccgtcgatcaccgtgccgtccggtaacccactcaccaggctgtgaagttcgggaaaacgctcggtcaccagctcttcgccacgggaccatatccacaggcgcccatcgcgcttgaccagttgtgcgcggatgccgtcccacttccattccacctgccagtcggcgggagaaccgagcagcgcttcgaattgctccaccggttgcgccaagccatgagccagaaaaaacggataaggctggccgccccgttgtgcatgctcgtcggacgattcggcggcgatcagcttgaggtagccctcagcggttggacgattggacaggtcggtgtagcccactaaccgctgcgccacacgcttgctgtcgaggtcggccatggcggcgagggcacgggtgaccaacaacttggatacgcccacgcgaaaactgccggtgatcaacttgatgcacaccatcaggctcggttgatcgagttgcgcccacaacgccggcaggcgctcagccaattccaggggaggcaagccgcgcaacggcaggagtttttcctccagccacacggccaggccatcctccgaggtgtaggcagattccggtagcagcagggaaatggtctccgccaggtcacccaccgactgatagctttcctcgaacagccacggctcgatgccggacgctgcggtggccatgtcccgcaacaggcgggtcggcaccaattgccgtggccgtccgccggacaggaaatacacggcccaggcggcatcttctggcgcggccccccggaagtaggcttgcaacgcggccagcttggcgttgctggaggtggtggcgtcgagattggcgtacagctcggcaaaggccttcatgcgccggcctcttcttcgtcatcgccgtattcggtggtgaagccctgggcatccaggcctttttcccgcaggtggcgcaccaatacgccgacagaaccgtgggtgaccatcacccgctcggcgccggtctgctcgatggcccacaacagtccgggccaatcggcgtggtccgagagcacaaagccccggtccaccccgcgccggcggcgggtgccgcgcaggcgcatccagccactggcgaaggcgtcgctatagtcgccgaagcgcttgatccaactgctaccgccagcggagggcggggcgatgatcagcgcttggcgtagcaacgggtcggtcttgttgaagtcgccggcgtagagggtttcagggatatggatgccggcctcgcggtacacccggttcaacggttcgaccgcgccatggctgaggatcgggccgatgctggcgtcgatgccatgcaggatgcgctgggccttgccgaacgagtaacagaacaacacgctggctttgccgacggcgatgttcgcctgccaccagtcgttgatcccggcgaagatcagcgcctggggctgccagcggtagatcggcaggccgaaggtggattcggtgataaaggtgtggcaacgcaccggttcgaacggcgcgcaggtgccatcgggctcgaccttgtagtcgccggacgcgacccagacctcgccctggtactccaggcgcacctgagccgagccaagcacatgcccggccgggtgaaagctcagggtgacaccgtggtgcaccagtggctcgccgtaggccagggtttgcaggttgatgtcctggcccagcctggagcgcaggatgccttcgccgggggctgccgccaggtagtgctggttgccagtgcgggcgtggtcgccgtgggcgtgggtgatgaccgagcgctccaccgggcgccaggggtcgatgtagaaatctccggcggggcagtagaggccttcggggcgggcgatgacaaggtccatggggtgaccgggggaggtgggcttgttacttatgaggcggggctgagctgagaagttctatcggagtgcatgcagtccaaatgtgggaggggcggtgcgacgattcgacttgcccccgattgcggtgggtcagttgcaccttggctggctgatacaccgctatcgggggcaagccccctcccacattagatccaggtttttcatgaaaagccgggttatttaccgggtgtcagggtcaaccgggccttcccgtacaccttctcgaagttctgcggttgcatcgggaagctcaggtattgcgccttgagcgacgggtcgatgccattggcatagttcgggctggccgggttgccggattggccgatgccgccctgacccatcatcggctccacctggccgaaatcgacaatcaggcgcagcgccggcacctgggtggtggtgaagtcctggccccagctgtagggcgccgggttcaaggtgttgtggtcgccaccggaggccagcgggccacgaatcacctggccattggcgtttttccaggtggtggtgtgcagcttgccccactgccaggccttgtggtcggcgcccagctgactgtcgccggcgctgatcgcggcggccaggctgcgggcgaggatcgccggtttgtcttctttctgcggcgtacgcacgtcatcccagaacgggctgtcttcgcggcccagcaagtgatcggcctgggcggcataggacaggctggcgttgctgacaaaggctttccagctggcgctgttttccggccccagctcgtcgaggaagatctgtctggtgctctcctgcaggaacagttcgtagagcgccgcatcggcagaggtggacaccaggcgaccatcgaacgccatcaggcgccccagcgcctcacgggccttggcctgttccgccgcaggcagtgcgtcaatcgcctgtttcagcggctgggccatgcccggcgcctggaacatgctcttgagcttggcggcgaaggtggtggtttggtcgtactgcatggcgatcatgctgcggctgtcatgcttgccggcattggccagttgcgccaggcgctcgctgcgctccggggcgtcccaggagttggacagttgcatgccatagccacgcggcgcggtgcgctggttggcggtgccgatccagccttgggccggatcctggtcatagggatgcagcatcgcgtcggcgtagccatcccagtcaaaccgcgtgtcccagcccggcgacggcagcaagccttcgccttcgcggcggttagggaagcggccggtgacttgccagccaatgctgccggcgtcggcgaagatcatgttaagggcgatggcgcggatttcccgggtcgcatccgaggctttgccgatggtttgtgcgcgggacaggtcgaagaacgcatccaggctcttgtcgtccttgaagtcagcggtttgcagggccaggcccagaccggtggtcaacgcctgactgctattgagcagggcgccatgacgggtttcgtacaccacctcgcggatcgagcgttggcccttgatgaagaaggtttcgttacgcacgcctgccggcagccatttgccgttgttctcgtagtacagcgcgctgccctggcgcttgaccttctccaggaacaggtcctgggtgtcgcccttgaccgtgctcatgctccacgcgactttgccgttgaagccggacaacagtgtcggcaggccggcaatcgaagcgccggcggcctggtatttcggtgcacggatctgtacgtagctccacggcgacggtgcctgcggctgggcggcgaggtcgcctgccagcaggcttttaccgctgcggctgcgctgcggggcgatggcccagttgcttgaggtggtgactgccagggcgttgaggctgctcagttgctggctgaccgcgtccagcccggccaggccggtgatctgacccaggttcacacccttgagtttttcggcctcggccagtgggatcgcttcatccggcgcgctgggggtgagccaggcgagtttgtcgacgccgaccttctgcgccagcaccagcgacgaaatctcttcatgcaggttggccgattcgctgaaattcagcaggcagaacagcagcgccgaatcttccggcttccagtactcgggcttgtagccggtctgggccaggtccggcggcagcttgtcgcggtagcggaacaggtaggcgttgacgccgcgcgcatacacttcaaagaagcgcttgaggcgcgggctggaggcgttgtacagctcgccggcgcttttcttcaggttgaccgcgcgcatgaagcggtcgacatccagcacttcgggcccggacatttccgccagccggccctgggccagcaggcgcagggtgaccatctgggtgatgcgatcactggcgtgcacataaccgaggctgaacagcgcgtcgtggaaggtgttgctttcgatcaacggcatgccctgggcattgcggcgtaccgatacgttctgcgcgaggcctttgatcggctgtacgccggcaaccggcggcagggtgtcctgggtgctctggagctggcaaccggccaggcttaacgcactggccattgccgcggcaacgccgaaccggggaagaaaatgtgagagggctggcgaggccatggcaaagctcctgcggggggtagcgtcagtaaaggcgctacgttagtgagcgcggcgaaacgacgcaagcgggagccatgccttattttcaggaattgcgtatcaagacttgggcgggttcactttctgcaccagctcatacgcccgaaccgtcgccggccgttctttgatgctgttgaaccagcgctgcaggtgtgggaaatcttccaggcgctggctctgccatttgtgggaaacaatccacgggtagatcgccatgtcggcaatgctgtagtcctcaccggccacgaacgcacggtccgccaggcgccggtcgagcaccccgtaaaggcgtgcggtttcatccacatagcgtttgatcgcgtaggggattttctccggtgcgaattggctgaagtgatgattctgccccgccatcgggcccaagccgcccatctgccagaacagccattgcagcacttcctggcggccacgcaggtcgtttgcaatgaactgaccggttttttccgcgaggtacaacaggatcgcaccggactcaaacagggaaatcggtgcgccgccgtcggtcgggttctggtcgacgatggccgggatgcggttgttgggagcgatcttcaggaagtcaggcttgaactgttcgccctggccaatgttgatcgggtgcaccttgtagggcaggccggcttcttccaggaacaacgatattttgtggccgttgggggtggtccagtaatacaggtcgatcatgaagctctccaaaagtggtgatgcttgagcggatgcctgtaggtataggtaatgttgggcgtgcgaaaattcaatgaaacatttatgcatacccttagaagccaatcagaaagcgccatccaccaacacctgcaacgactgctcagaacaacgttcgatgcgcgcccgcacgcgatacacctcggcaaacaacagcgggttgagcacgtcgtttgccgcgccgctggcatacaagcgaccctggcgcagcacggcaatatggtcggcaaaacgtgcggcaaggttgatgtcgtgcaataccaccacggcgatcaggttgtgttcgcgcaccaggtcgcgtacgcactccatgactttcaattggtagttgaggtcgagggcgctggtgggttcgtccagcagcatcacttgggggcgccgtgcaatcagctgcgcgaggctgaccagttggcgttgaccgcccgacagcgtgcttaaccactgatcggccaggtgcgcgatgccaatgcgttgcaacgctgcaaaggcttcgcgcaggcaggcgtcgttggacaatggaatgccgtccacactggccacgcgcagcgcggcaattacactttccatcacgctgaggctcaggcccggtggcaggttctgcggcatgtaggtcacgcgccgggcgcgctcggccacggacatggccgacaggtcgagttcacccaggcttacgacgccttgcatcttttccagcccggccacggcgcgcagcaaggtggacttgccggcgccgttggggccgatcagggcggtcaggctgccgtggggcaaggtcggcaggctcaggtcatgcacgatctgcctgcggccataactcacattggcgttgtgtacgcttaacccttcgctcataactgcctcccgcgcttgaacaccagcaccacgaaaatcggcacgcccaccaacgcggtgacgatgcccaccggcacgatcacacccggcatgatcagcttgctggcaatcgacgacagcgccagcaacagcgcgccggtcagggcgctggccggcagcaggaagcgctggtcttcgcccaccaggatccgcgcgatatgcggacccaccaggccgataaagccgatggtgccgacgaaggccaccgcggtggccgacaacaggctgatgcgcaacaacgagaaaaagcgcaagcgtttcacgtccacgccgaagctttgcgcgcggtcttcgcccatgcgcagcaaggtcaggcgcggtgcggcggcgaaggaaaacggcagcaccaccgcgaccaccagcgccaggatgccgagcttgtcccagttggcccgggtcacgctgcccagggtccagaacaccagttgttgcagcacatcttcggtggccaccagttgcaacaaagccaccaccgcgttgcaactgaacaccagggcgatgccgaacagcaccaggctctccacaccggcgccccgtaggcgcgacatggcttgcagcaaaaataccgaggcggcggcgaagatgaacgccgagagggagatcgccgtgttggccgacacccacagggtcgtcaccgggaacacaatcaccagggatgcccccagtgccgccgccgacgacacgcccaaggtaaacgggctggccagtgggttgttcaagatcgcctgcatctcggcgccggccagcgacaacgcacagcccaccagtatcgccatcaacgcgtagggcaggcgcacgttccagatgatcacctggtcggtggcgctgaggtgggacgggtgcacaatcccgtcaagcaaggccagcaggcccatgccggacgggccgctggccaggtccaccagcagggcgcacaccagcgccgtgccgagcagcgccaatagccaggcacgccgcgcgagcaggcggcgatagccgtgggtggctgaggcgaggtcgagagtttgcgtggtcatttaggcgtgtcgacccaataggcaccctgcaacggcatccccaggaactgctggttgatctgctccatggtcgcctgcgggtccagcttggcgaactgttgcggatgcacccacttggccaacgattcaatcgccagcaggttgtacggcgagttgtagaagtcatgccacaggccgtgggcgttgcctgcgcggatggcacgcaggttggcgaactcggggcgcgccaatacgcggtcgaaggcttcacgcgcctcgtcatggctcacgccggcacccaggaccagtcccggtttgtggttgccggtggcgacatacacatccggatcggctttcaaggcgtactccacgctgatatcccccagtgcccccggcaccacatcggcggcgatgttgcgcccgcccaccagcttgatcacttcccccatgccgctcttgcccgtggtgtgccccggcgcttgccaggcgccggccagcagttcgaggaacacgctcggacgcgagccggccggcaaggtggcgaccgcgtcggtgataaccttgaggtgctggtcatagaagtccaggaaagccttggcctgggctgcgcgccccagcgcctggcccagcgcgttcatgctggtgtgggtgccttgcaccgggttgatgcgaaagtcgacgaacagcaccgggatgcccgccttggccagcacatcggcgaccgggctgtgttcggtcgggccgtggccggaaatgctgaacactgccaggtcgggtttgagcgagaggatttcctcggcgctgacgctttgttccgacgcctggccgatcagggggatgtctttgaccgtcggaaatttcgccacgtaggcgttataggtgtgctggtcgagcagcttcaaatcgttctgccaaccgacgatgcgctggaacggcgcatcgcggtccagcagggcaaacgccgaaatcaagcggccttcaccgagaaccacgcgcttgacgttgtccgccacctcgaccttgcggcccagcacatcggtgacttcatgggcggcagcggtctcggcatggccaagaaccaacgcggcgaacagtacgcccagcttgaacacattacggggtttcagcatggcagggactccaggtgaaggcggcgcatcaggtattgctccagcgccgcaaagggttgtgaggcagggatctcgatcagcacggttcagaactcgtagtcgacgctggcggtgagggtgcgcccggcgcccggaatgccgtagagctggaagccatcgagggacgcgccgacctggctgtaatagaacgtgttgaacacgttgttgaggttgaggttgaccgtggtgtccttgttcaccttgtattgcgcggccaggttgctcacccagtagccaggggctttttcgtggtcgcgggtgtagatcgcgtagaccccggacgggccgttggcgtagctgctgttgttgttcaaaccgccgacgtacttgttgtcggtgtagcggcgccggcccacttattgctcgccgtagctgaggctcagggcgtcggtgacggcgtaggtggtccacaggttggcggtcaggtccgggacgttcttggcttcggcgcctttgttgatgcctttggtctgggtgctcttgagggccgagaaaccgctgtaggcggtccagcgcggggtgatattgccttgcaggcccagctcgatgccgtcgacgcgtttggcgggcagggcgcgtaccggggcggattcgccgtcctggtattcccaggcgttgtccagttcggtgcggaagatcgccgccgtgacgttgagcctgtcgtgggcaatgtcccacttggtgcccagttcataggtcttggatttggccgggctgtaattgctggtgctggccgcgccgtagatctggttgttggtggacgcgcccagcgccgacggttgcgcggcctcgctgtaagacacgtagatactgccgttgggcaacggcttgaacaccgcgccgacccgaccgctgaccgcaccatcggtgctgctgatcgtcgcctggccgcgttggcgggtttcggcacgccagttgtcgtagcgcagcgagccgagcacttgccactgctcgttgagggtgatggtgtcgcccaggtagagaccggcgttgtcgatcaccgagcgcgggtcgccttcgcctttggtcacgtaggtgctggcgaagctgtggctggggtcgtgcatgtcaaacagcatgttgccggccggcacttcggcgttgcgtttcaggccgccgtaggtctcgtgatagaactccaggccgctgaccaccgcgtgctgcaggctgccggtggtgaggttgaaattgaagtcggtctggttgtccaggatggtgtagcgcttggacaaaccaaagtcgctgccgcgcaggatgccgtagccggtgttgctgttgttcacgtagtcggtgtaggcattcaccgtactgccgggcacttggctgatcgggcctacgccggtgtaacccaaggtcgcacagcgggtgccggtgcaggtcttctggccgttggcgttggcggcgaagaagcgcgccggcgagagcacggcgaagttgtcgctgcgttcccagcgcgtctggttgcgcaggttggcgtcgttccaggcgaagtcatgctcgaagcgcgccgtgagcgaggtggttttgttctcttgggtatagaggcgggagtcgccgtaccagttggagcgtttcacgcccggcatgcggtcgccgttggtaccgcgctggatcggtacaccgccgtccggggtgttggtgtctttctggtagaaggtgtcgatgaacaaccgcgtgtcggtgcccaggccgaagccgaacgaagtagcgatgccccagcggtcgtagtccacatcgtcgcgctcggccacctggttgtagtgcttcatcaggttgatacgcacggcagtggtgtcattcagctgtttattcaggtcggcagtgaggcggcgatagctatcggtgccgatcccggccgagactttgttggcatcgcccaggtgcgcttccttgctgaccaggttgacgctgccacccacggccgagactccggactcgatggagccggtgcccttgaacacttcggcctgttgcaggttgaaggtgtcggtgcgcgtggacatgccggcatcgcgcacaccgtcgacggtcaggctctgctcggaagaaaacccacggatcgaaaacagatcgccccagcccaggttgccctcgccggacataaaggtaatgccggggacattgcgcaacacttcctgcaaggtctgtgcgttctgctccttgagcacctgttgcggcacgatggttacgctttgcggtgcgtccagcagcggctggctgattttggccgaggtgacgcggtccaccttgaaggtggaagtggcttcgccgtcgacctggatttccggcaggttcaacaccgaatcgccggacgtggcggttggggcgtcagccagggcaaccggtgcgacgccgccggccgccagcaaaccgaacatcggggccagggtggtgtgcagcgtgtggcggtgaggcgtgggcaaggataggggcaatgacatggtaacgtccgagtctaaattacaattactctcatttaggttcggtagtctaaagagcgattccgcctgccataccccgggtttgtatcgctgatgcgtgattagggtttcctacaacattccattacatttgcctgcgctgctggctgaactttcggctatttgctgcgtttcatcgtttttcggattgactgcccatggccaagcaagaccacctgctgatcgttgatgacgacccgcaaatccgccaactgctctgcgactacctgagcgacgccggcttccaggtgtccaccgccgccgatggcaaggaaatgcgccgccgcctggcgctgaatgtcatcgatctgatcgtgctcgacctgatgctgcccggcgaagacggcctgagcctgtgccgcgaactgcgggtgaactccaacacaccggtggtgatgctcaccgccaagggctcgttgatcgaccgtatcgtcggcctggaaatcggcgccgacgactacctgcccaaacccttcgacccgcgcgagctgctggtacggatcaaggtggtgctgcgccgggtgcagagttttcccgaccgcgcgcgcctggatgaagcgccgagcattcgttttgccggctggcagctcgacacacgggcgcggcaattgctgtcgccggagggcgtggtggtcagcctgggcaactcggattaccgcgtgctgcgcctgctgttgcagcaccccaaccgcccgttgagccgcgattttctgctcaaccacgtgttcgacaaggacagcacgccgttcgaccgctccatcgatgtgtgtgtcagccgcctgcgctcgcaactgccggcagggttgatcaagaccgtgcgcaacgagggctacatgctcactgccgatgacgtggtgctgcaatcgtgagactgctgccgcgttcgctgttcgggcggttggtgctgatcctggtcagcggcatgcttgcggcgcaggccctgaccagcagcatctggtacgaccggcgccacgggcaggtgctggaaattcccgcgcggttgatcgccacgcgcctggcggacgtggtgcgcctggtgcacagcgatccgcagcaggcagatgtgctgatcaaactgctcgacacgccgaacttccgcctgagcctcagtgatcaggccagcaacaccccgagcaccctgcacgacagcgaccgcccgaccgaacggctgatcaagaaggtgctgtcggaaaaaaccggttatgcccagagcctgatcctgttgcgcttggctttggtcgatggcgatgggcagaccgccgggctgtcgaccctgctcggctccaagccggtggtggggcaatttttgatcgacctgcgcctgcccgacggtcgttggttgcaggtggatgccagtgaggaacagggctggaccagcacctcaccgttggaccttttgttcgattacgtcatgcgcatttatttgctgcgggtgttggtgctggtgctgatcgctctggtggcggtgcgcctggccatccgcccgctcaatgcgctggccaaggcggccgaagcgctgggccgggacatccagcgtccgccattgtcggtggacggccccaccgaagtgcgccgcgccgcccaggcgttcaatgccatgcagcagcggctgatcgccaatattgccgagcgcacgcgatttcttgcggccatttcccacgacttgaggtcaccgatcacacggctgcgtctgcgcaccgagatgcttgaggacactcgcaccaaagagcgttttcgcagcgacctggaagaaatggagcacatggtctccagcacgttggattttgtgagcagcggcgaaatcaacgagacgcgacagaacatcgatatcaacgccttgctgcaaagcctgcaggcggacctacaggacgttggcgaacaggtggtgattgagggccgggcgaagcagccattgcccgggtatgcccgcagccttaaacgttgcgtgcagaacctgatggagaacgccgtgcggtatggccgtgatgtggtggtgcgggtcgaggacaaggcggacagcttgaagatcgtcatctgcgatcgagggccggggattccccaggaacagttggagcaagtaatggaaccgttctatcgggtggaaggttcgcgtaatgccgagaccggcgggtatggcttgggattgagcattgcccgcagcatcgccaaggcgcatggcgggcgattggaattgcgcaatcgggaaggcggaggccttgaggtggaactggtgtttcaacgcaaatcctgaatgtggaacgcaactgaatgtgggaggggcggtgcgacgattcgacttgcccccgattgctggctgtcaggcgctgaataggagactggtataccgctatcgggggcaagccccctcccacatttaaatcttcagcgtggctttacgccccgtggcacttcttgaatttcttctcgctgccgcacgggcaaggatcgttgcgacccacgtccttcagggcattgcgcaccggctcctggtgagcgtggccgcagttcgggccgtggacatggccgtggtcgtgatcatggtgatcgtgatcgtggttgcagtcaggaccatggacatggggttgctgagtcatcgatgtcgctccggaataaaatcgccggggattatctcgccattgtggttcacctgcacgtcataaccgatgaataatccggttttcagctcgccttcgaggcgatagggcacggggcggtcgggttttttcagcatctgcaccacatcgcggatctgcggccagaggttggtgcgcaccgacaccttgaaaaaggcatggccgcgtggcggcaccgtgagccattcgttggactcgccctcggtgagcacaaagtcatccagcgtcaccttgtagatcaggccccgcacggtcaggtcggcgtcgtcgcggttgtccacgcgaaagtacagcttgaatttctgctccagcagcttggcccgtaccacttcgacctttaccagggagacgtggggcggcggcgcgtcgtcttcgaaccacgacgcgcagccggtcaggccaagggttaacgccagcatcaagctgtagatccggagcatggcgtgagtcctgtggtggttagagatagctggaacaacacttcttgaatttttgcccactgccgcacaggcaggcatcgttgcgtccggccttcacttccacggtcgggtcgatgaagtaccagcgcccgtcattctgtacgaaagaagactgctcgcggtggctatgttcaccggtgctgtcatgccagcgcgcggtgaaggtcacgaacgcgtgttccggctggccgccgaacacctcggagctttctacttcaaggccgagccaggtgctctgggcactccaggccgcaatggcggcacggtccaggccgggctgttgcgcgggcagcgtggtggcaaccagatagtccaccaggccgagtacgtaggcgctgtagcgcgagcgcatcaacgcggttgcgcagggcgccgggtgcccggcgtgataatggccgcagcaggcatccagcaggttgccactgccgcaggggcaaatggatgtactcatcgggttaccaccaatactttccgaagttttccgggttcgcccagaagcgggcgttgagccagtccggcacttgtttatagtcaagcagatcgtaggtaaacagcgtcagaacctgctcgtcgcgctggaaacgctcgccggcctgcagggccagggagaagaagtcggtgtccttccagtcgcagtcacccaggtccaccagcaccgcaatgcggctggcattgaggttgcggatgccgccgagcagggtcaggccttgcggttttgacaggtgctccaggcagtccaccaccagcgccaggtcaaaacgctgcgccgccagctccgccgacagtgggccgggtggggcaagagcaacctgggtgtcggggtgtgctgcttgaaaagcttccagcgccgggaactggctggcgcccaacagcaacaggcgtttgggctggtgcaggtcgagcaaggcggccagggcctgctggggtgtacggtcagaaataccggcggtcatcagagatcctcacatcaggaccgtagagactagcgcggctgagcgtgcgggcctagagcgggcggtggcgaaaagtcctacgagggcgatgatcctcaatgaatacgggcgcgcggcgtagtggcgcagatgaaaagagccgtctttactccactcatcggcccccgccgatcccctcaggagaaactcaatgagcatcatgcggacagctctacccttggttctgctaaccggagtattgacaggttgcgcaggtttgcaaaaaaccgattggcccacctgtgccgccgttggcggtgtgaccggtgcggcgatcggtgccactgaaagctcggcctatgcgggctacggcgcgttgttggtcggcggtatggccggcgcctattgctgggtgcatggcgacggtgacgaggacggcgacggtgtgccggacagccgtgacaaatgcccaggcacgccaaaaggcgtgcaggtggatgccaatggctgcccacccgcgccgccgccggctgtggttgaggaagtggtggtggtcaaggaagaaaccattgtgatccgtgacgtgcacttccagttcgactcagccatgttgacggcggcggataccgccaagctggacaccgtcgctacccgcctgaaacaggaagccccaggcgctcaactacgggtcagcggtcacaccgacagcgtcggtaaagacgcctacaaccagaaactctcggaaagacgcgcgcattcggtggtcgagtacctgatcaagtccggtgtgccgcgcagcagctttgtatcggtgaccggtgcaggcgagagccatccggtagccgacaacaaaaccgctgaaggccgtgccttgaaccgtcgtacggaaatccagatcaaccgctgacggcccttgcccctgtggaatcccacaggggcaatactgccgatcctcccctttattaacttttttgatccttcactggcaaagcgcctgcggaagtcgttactgtgcgtccaaagaaaaactagaaatattttttgaaaaaattcaggggagctccatgatgcgtaaggtttttctgttggccctgttggtcagccccgttgccctggcccagagcgtcagtgttgaacccaactcgttgatgcgcctgcccaacagcaccagcgtgttgcaattggagcgcctggaggtggcggactacggcaccttgctgatccccgccaacatcagccaggtcagcgtggatgagttgcgcctgggccgcgacgcccgtatcgccattgttcccggcaacaccgcgctgcaattgcaggtgcatcatgcgcagttggatcacggcagccagatcacctcccgcggcgctcccggcacccacgaaaaaccagccaaggccgggcgtgacctgaccctgcgcatcaattccctggcggcagaagaactctcggtggatgcccgtggcggcgccggtgcccaaggttatgccgggctggacggtgccaatggcgtggatccgggttgcacctggggctcggccggtcgtggcgccaatggtgataacggcggcgatggcttgccgggggcgtcgggcgcgcaggtacgggtcgagttgccgcaggatttcccggctgaccatatcaaggtttgggtcgacggcggtcccggtgggttggccggtacggcgggcaagcctggcaagggcggccagtccaaaggctgcctggtgtatcgcgccgatggcggcgagaaaggccgtccaggcttggaagggcagccggggccggcagggcctgcggggactgtgaccatccagcggctttgaattgcttgctctgacgccatcgggggcaagccccctcccacaattggaatgcattccaactgtgggagggggcttgcccccgatggcgatatatctatcgcctcagaacatcggccgagccgaagcaatcgccaccaccaccaaccctacaatcaagttgatccccaccaaccggcgaatctgccccagcgctgctgcgcccgccggccaatcctcagccgccactgccttgcgcagttccggcaacttcagcgcctggatgcggataaacaacgccgtcatcaccagatacaggcccatcatcacctgcacataacgcggtgccgtctcaaacccgttgaagcgcaagtgcagcagaccaatgccgctgatcggcaaaaccgccacggcgatccacacccacacgaaaaaacgttgaaacacatttacccacagcttgagccgggcagggccttcaagtgccgccacagcggcggggcgcaggatcatccaggcgaaaaacataccgccgacccatatcagggcggccaatacatgcagggtgtaagcgaggctaaacgcggtcattgtggtactccgttctgcgcgggattcattagcggggtatgatagccgccgatccgaaccactgaaaatttatccagcgttttttgcgcccgactatccatgatcagcactgaactcaaaaccacgatccagggtgcctattcgcgttttctcgaagccaagagcttgaaaccgcgctacggccaacgcctgatgatcgccgaagtggccaaggtcctcggggatatcgacaccgacgacgaaggtcgccgcgagggtgagcccgcggtcgtggccgtcgaggccggtaccggtaccggcaagaccgtggcctacagcctggccgcgatcccgaccgccaaggccgccggcaagcgcctggtgattgccaccgccactgtcgccctgcaggagcagatcgtctacaaagacctgcccgacctgatgcgcaacagcggcctgaacttcaccttcgccctggccaaggggcgtggccgctacatgtgcctgtccaagctcgatgtgctgttgcaggaaggtcacgcgcaaactgccactgcccagctgttcgaagaagaaggcttcaagatcgaagtcgatgaggccagccagaagctgtttaccagcatgattgagaaactggccggcaataaatgggacggtgaccgcgacagctggcccaccgccctcgaagattccgactgggcacgcctgaccaccgaccacagccaatgcaccaaccgtcattgccccaacttcggccagtgcgccttctacaaggcccgcgaaggcatgggcaaggtcgatgtgatcgtcaccaaccacgacatggtgctggccgacctggccctgggcggcggtgcggtgttgccggacccgcgcgacaccctttatgtgtttgacgaaggccaccatctgcccgacaaggccatcggccatttcgcccattacacgcgcctgcgctccaccgccgactggctcgaaaccaccgcgaagaacctcaccaaattgctggcccagcacccgctgccgggcgacctgggcaagctgatcgaacaggtgccggagctggcgcgggagatcaagacccagcagcaattcatgttcagtgcctgcgagcaggtcgccgacttcaagcccggtgaggatgtggaggggcgtgagcgtccccgccatcgttttgtcggcggcctgatccccgagcatatgcgcgaaatgggcatcgagctgaagaagggcttttcacgcctgactgacctgttcacccgtctcacggatttgctcaaggaaggcatggacggcgaggtcaacatcggcatcgccagcaaccaggccgaggagtggtacccgctgttcggcagcctgctgtcccgttcccagggcaactgggagctgtggaccgccttcaccgtcgaagacccggaagacaacccgcccatggcgcgctggctgaccctgtcggaaagcggtgcgctgttcgatatcgaggtcaacgccagcccgatcctggccgccgaaatgctgcgccgcaacctgtggaacgtggcctatggctgcctggtgacctccgccacgctgaccgccctgggcaccttcgaccgcttccgcatgcgcgccggcctgccgaaaaaggctgtcaccgccgtggtgccaagcccgttccatcacgccgatgcgggcgtgctgcgggtgccggacctcaaggccgacccacgggacgcagcggcgcacaccgccgccatcatccgtgacctgccggagttggtcgaaggttcgcgcggaacgctggtgctgttctcgtcacgcaaacagatgcaggacgtgttcgatggcctcgaccgtgactggcgcaagcaagtgttcattcagggcaacctgtccaagcaggagaccctgaacaaacacaaggcgcgtgtagacggcggcgactccagcgtgctgttcggcctggccagcttcgccgaaggcgtggacttgccgggtgcctactgcgaacacgtggtgatcgccaagatcccgttctcggtgccggacgatccggtcgaggcggccctggccgagtggatcgaggcgcggggcggtaacccgttcatggagatctcggtgccggatgcttccttgaagttggtccaggcttgcggtcgcttgctgcgtaccgaagaggaccggggcaccatcaccttgctcgaccgccgtttggtcacccagcgttatggcaaggccatcctgaatgccttgccgccgttcaggcgcgaaatttcttaagccactgtgggcgttttcgcccacttcgtggtctatctcactgtatttcatcaggccattcatcggccgtctgggagaaccttgttcgtatgattcgcacgctgcccgccgtttttgccctgctgtttgccgcgcccttgatggccgcgcccgctgggcaacagactttgttcaacttcgtccggcctgccgatgtggtcaaggtggcgaccctggacgccagcctgccgcaatacaacgccgaacaaacccctgagggcgaagtgctgcgccgcatcacattcaacccggccgccgaaccgagcctggtgctgagcccgcagaccggcacctgggactggtcccagtcgggtgccatgagcctgcgtatccagagtgcgatggactgggcattgaccctctacgtcaaggtgcagagcgcggatggcaagaccctggtcagccgcatcgacctgccggccggcccggcccagaccttgctggttcctctgcaggccaactcgccgctgagccagggcatgaaggccggcccaccgatgccgatcactgtggacggccagcgtgtgctgctggccagcagtgcaggcgaaatcgaccgcagccaggtggtgtcggtgacggtgtcgatgctcaagcccaatgccgcccaaagcatcctgctggagcgctttggcgtgcaggacagcgagccggtgctgaaggcggcctacagcgagctggtggacgcctatggtcaatccacccgtgcgcggtggccggaaaaggtcagcagtgacgaacaactcaaggccgccgccgccaaggagcaacagcagctccagggctggctggccacgcgggataaatccgctttggatcaatacggcggctggaacaaaggcccggcattcgatgccagcgggtttttccgtaccgagaagcgcgatgggcgctggtacctggtgacgccggaagggcatccgttctactccctgggcgtcaataccgtggccccggacaacagccagacctatgtggccggccgtgagtggatgttcgccgcgctgcccaagggcggcgaaccgttcgataagtactacggcagcggcgacaaccgcagcggtaacggcgcgggggaaggccgtggctttggtgccgggcgttggtatgacttttacggcgccaacttgcagcgcacctatggcggtgatggcttcgaccagaaacgctgggtcactcacaccctcgatcgcttgcaggcctggggtttcaacaccgtcggcaattggagcgacgagagtctggccaccgctgaccgggttccctacactttgccgctgtcgatcgtcggcgattacgccagcatcagcaccggcactgactggtggggcggcatgcccgacccgttcgacccgcgcttcgccatggccaccgagcgcgccgtggcgattgccgcccgtgaccaccgcgatgacccgtggttgatcggcttttttgccgacaacgagctggcctgggccggccccggcgatgatccgaaatcccgctacgccttggcgtacggcacgctgcgcatgaccaccgacgtgccggccaagcgcgcgttcctcaagcaactgcgcgacaagtaccgcaacgaagaaggtttgtcgaaagcctggggcatcgagttgaagggctgggagctgatggaggacccgggcttcgaaccgccgatgccgaatcccgagcacccggaaatcgaggcggacttcaaatacttccagaagaccttcgccgatgcctacttcaagaccatttccgactcgttgaaatggcatgcgccccatcaactgctgctgggcggccgttatgcggtcagcacgccggaagccgtggcctcctgtgcgcaatattgcgatgtgttgagtttcaatatgtataccctcaaaccccaggacggttacgacttcgccgcgttgcgggcgttggacaagccggtgctgatcaccgaattcaacttcggctcggccgaccgtgggccgttctggggcggcgtgacgcagttggccagggaagaagatcgcggcgcggcgtatgccaacttcctcaagcaggccatggccgagccgtcgattgtcggcgtgcactggttccagtacctggaccagccggtgaccgggcgtctgctggacggtgagaatggccactttggcctggtcgggattaccgacgtaccgttccagggttttgtcgacagcgtgcgcaaaagcaacctggcagccgtcgaccaactgggcaaggaggcgcaaaaggccaaagcggcaggcgccgtgcgtgaaagcgaaggtggcagggccgggcatgaaggcaaaggcccggggcagggcgccgggcatgcaggcgggcactccgggaatggtcattgattgagcgctgacgggttcacaaaacccaccagggctggaacaatgtcggccacttttttcgatgttttccgagggcgctcaggtgcagatccagggtcattacgaactccagttcgaagcggtacgggaagcgttcgccgcgttgttcgatgacccgcaggagcgtggtgccgggctctgcatccagatcggcggcgaaacggtcgtcgacctgtgggccggcaccgccgacaaggacggcgccgaggcctggcacagcgacaccatcgtcaacctgttctcctgtaccaagaccttcaccgccgtcacagccctgcaattggtggccgaaggcaaattgcaactggatgcgccggtcgccaatgactggccggaattcgccgccgctgggaaagaagccatcaccctgcgccagttgctgtgccaccaggccgggttgccggcgatccgcgagatgctacccaccgaagccctgtacgactggcaattgatggtcgataccctggcggcagaagccccttggtggacgccgggccagggccatggctacgaggcgatcacctacggctggctggtcggtgaattgctgcggcgtgccgatggtcgcgggccgggagagtccatcgtggcgcgggtcgcacggccattgggcttggacttccatgtgggcctggcggacgaagagttttatcgcgtggcccatatagcgcgcagcaaaggcaatatgggcgatgaagccgcgcaacgtttactgcaagtaatgatgcgcgaaccgacggccatgaccacccgtgcatttgccaatccaccgtctattctgaccagcactaataaacccgaatggcgccgtatgcagcagccggcggcaaatggtcacggcaatgcgcgcagcctggcgggtttttatagtggattgttggacggtagtttgctggaggccgacatgctcgaacaattgacccgcgagcacagcatcggcccggataaaacattattgacacaaacccgtttcggcctcggctgcatgttggatcagccgcagttggccaatgccaccttcggccttggcccacgtgcgttcgggcatccgggcgctggcggttcggtggggtttgccgatcctgaacatgatgtagcgttcggtttcgtgactaatacactcggaccttatgtacttatggacccgcgggcacagaagttggtcagaatattggccggttgtctgtaaaccccttgctgtttcacgtttttttgttacaaaggcaactataagaagacgctgtaggaatagtcgtaactttattcatctacaagcgtctgtttaacggatcatttagatccctggttttttctcattttgtggatatctcatgttatcgaacaagtccttggctcttgcgctatgcctcactattaccggttgcgcacaaactccacaaaatgatgccgagggcgggcattggtggtcatttggatccgataaggccacgaccaaggacgcagtgacccaagccgatgccaagccggaggctaaaccggacgccaagccggctgccggcgccaagcctgccgcaccggtagccgctgcggctgctgcgccaaccccggctccagccgccaaggctgacaccggttccagctggtggccattctcttccaagaccgccgacgaaaaggctgccgatgccaaggccgacctgaaagccgacctcaaggccgcagaacctgcaccagcggttgccaagaccgacaccgaaacccattggtggtggccgttcgaaagcaaacccaaaccattggccaaggtcgacgtgaccaacgtgccgatgcccgacccgaaaatcacccaagcctggctggacgactatgagccgcgtctgcgcgcggccatcaaggacagcaacctgcaactcgagcgtcgcgataacgtccttgtggtgattgccccggttgatggttcctacaacccgaaacgcccggccatgctgctgccggtcaccctcggtccgttcacccgggttgccaaggcggttgaagccgatccgaagactgccgtgctggtactgggccacgtcgatgccaccggcaccgccccggccagccaggcgctgaccaaggagcgtgcacagtccatcgcctcgatcttcagcctcagcggcttgaagcaagaccgtctgatgctgcgcggcatgggcgacctgatgccacgtgcggccaacgacagcagccagggccgcgccctgaaccgtcgcatggaaatcatgttcacccagcgcaccaccatgctggcgctgctgagcaagtatcagtcgggtaaaaccccgcctgtcgccgaaatggttgcggtgcaggacgttccagccccggctccagccgccaaggccccggccaagaaagcttcgaccgccaagaaagcggctgccaagccagcggccaagaaagccccggccaagccagcggcgaaaaaagcggcacccgccaaagccaaggccgctgcaccggcaaacgaccaggcgaaaaactgatccgctgaaccagaaggataaagctgcatgacccaggcactggccgatatgcgccgtgactacacacgggatggcttgagcgaggcccaggccccgagcgagccgtttgccttgttccaccagtggtttgccgacgcggtgaaaaccgagcagccaccggtggaggccaatgccatgaccttggccacggccgaccaggacggtcgcccgcactgccgcatcctgttgctcaagggcctggatgcgcagggctttaccttcttcaccaattatcagagcgccaagggccaacagcttgcggcgcggccgtttgcagccatgacgtttttctggccgaccctggagcgccaagtgcgcattgagggtcgggtggtgaaggtcacgcctgaagagtcggatgcttattaccaggttcgtcccttgggcagccgcctgggggcatgggcgtctccgcaaagccaggtcatccgtgaccgggaagagctgcaggacctgctcaaggctaccgagcagcgtttcagcgatacccagcctgactgcccggagcactggggtggctatcgcctgttacccgaacgcatcgagttctggcagggccgtgccagccgcttgcatgaccgcctgaactatcgcctgcaaggggccgactggacccgcgaacgcctggcaccctgagctgcacctttcgtcactccgcttgaatgatgcctgtcaccccgacgtctctattgaagaggcgtcgggcgtgtactgctgcgccgcggtcttcagccagtgaggcaagtcggaccgtttgattttcaagctgcgagccttttccagctgttgcagcatgaaggtgcacttgtgcaggtcattacctgccagcgacagggccaggtcacggtctatccaacgtctgatgcgcaggtacaaccagccatggaaatacagtcccgcaagggttgtgactacaatgatgaagtaatccatgaagatcccggttgagagaacagcgctaccgttcgtctgtttttctggtgtgggcagtctgtactaaggctgaatgaaagcaattttctgcggtgcttgccgtgacaggcgtcaagctgcagcgtttaatgaccacctgtcctttggagttgatgctatgcgtaagtctgttttactggttgcctgctttaccaccctgtctttgctgctgggtggctgcgcctcgagtctgaccggcgactcgtactcccgtgacgaggcgcgtcgtgtccagaccgtgcgcatgggtaccatcgaatccctgcgtccggtgaaaatcgaaggcaccaagaccccaatcggcggcgctgcaggtgcagtcatcggcggtgttggcggcagtgccatcggcggtggccgtggcagcatcgtgaccgccgtgatcggcgccgtcgccggcggcctgctgggctctgccaccgaagaaggcctgacccgcacccagggtgtggaaatcactgtccgcgaagacgacggcagcatgcgtgcctacgtgcaggctgtgcaggaaaatgaaatcttccgcatcggcgaccgcgtacgcatcatgaccgttgacggtaccagccgcgttactcgctaaacgtcgggtgtagaaatacaaaaccccaaccgggtgactggttggggtttttggttttcgaggctgtcaaattcaaacctgaggtgcggcctttttacgactcgccattgccgtcaccgcatacccaatacacgccgccaatatcgacccggtcaaaatccccatccggtcttccccggcaaactcactggcccccggtacgaatgccagcgagccaacgaacaggctcatggtaaagccgataccgcacaggatcgccacgccaaacacctggccccagttcgccccgctgggcagggcggccaggccagtcttgatggccagccaggtaaggccgaacacaccgatggtcttgccgatcagcaggcccgcggcgatacccatgggcacgtggtgggtgaagctttccaggctcacgccggtcagggacacgccagcgttggcaaaagcgaacaacggcaggatgccgtaagccacccacgggtgcagggcatgctccagcgtgagcagcggcgagggctcggcgtttttggtgcgcatcgggatgcagaacgccaatgtcacaccggccagcgtcgcgtgtacgccgctcttgagcacgcatacccacaggatcagcccgacgatcaggtacggcccgagcttgatcacgcccaggcggttcatcgcgatcaacgcaatcaggcaggcgcccgcacccgccagggcggcaccggacaaatcggcggaatagaacacggcaatcacgatgattgcaccgaggtcgtcaatgatcgccagggtcatcaggaacagcttcagcgacaccggcacgcgcttgcccagcagggccagcacgccgagggcgaaggcaatgtcggtggccatgggaatcgcccagccggaaagcgccgcagggtagtccttgttgatcgcccagtagatcagcgccggcaccaccatgccgccgatggcggctgcgccgggcagtaccacttgcgagggcttggacaggtggccgtcgagcagctcgcgcttgacctccaggccgatcagcaggaagaacagggccatcaggccatcgttgatccacagcagggcgggcttggcaattttcagcgcgccgatctgcgccaccaccggtacatcgagaaacgcgctgtacaggtgcgacaaaggtgaattgttgatgatcagcgccaaggccgcagccgcgatcaacaacagaccgctggcggcttccagctggaagaaacgggtgaaagtgctacgcagaggcaagggatgctctccaatccaggttcaataggtgggtaccctaacccgtaccgttagttgttaaaacaaaagttatattcttatttgttataagaggctggctggggtgatgttgcggctaagcctagcaattgtgtgtccgattgcgtcggtactgtatctgtgtggtctgtaggaaaccccctaaaatcagggctgacaccttcagagaaactctccatgagcgaccaccgtccctgggcccgcgaagccattcgtatcattgaagcagacttccagcgcagcgccgacacgcacctgattcccttgccgctaccaggcttgccaggcatcgagttgtacttcaaggacgagtccagccatcccaccggcagcctgaagcatcggctggcccgctcgttgttcctgtacgcattgtgtaatggctggctcaaacctggcgcgccggtgatcgaagcgtccagcggctcgacggcgatttccgaggcctactttgcccgactgctgggtttgccgtttattgcggtaatgccggctaccacgtcccaggaaaaaatcgcacagattgccttctacggcggcaagagccacctggtacaggatccgacgcagatctacgccgaatcagaacgcctggcgcgagaaagcggtggtcatttcatggaccagttcacctacgccgaacgcgccactgactggcgggcgaacaacaacatcgccgagtcgatcttccagcagatgcgtttcgagcagcatccggagccgagttggctgatctccagccctggcaccggcggcaccaccgccaccctcggtcgttatgtgcgctatcgccagcattgcacccgcgtgttgtgtgccgatgccgagcgttcggtgttctttgatttctaccagagtggtgatgccagcttgcgtctggactgtggttcgcggattgaaggcattggccgaccacgggtcgaggcgtcgtttttgcccaaggtcatcgatgcgatggtcaaggtgccggacgcgctgtcgttggcggccatgcattacctggctgaacggctgggacgacgggttggtggttccagcgggactaacctgattggcgccctggtggcggcgcagcagatgaaggcggcaggagagtcgggatcgatcgtggcgattttgtgtgatggaggtgagcggtatgccacaacctattacgaccaggcctggctggcggggcagggctatgcgttggacggtttgattgcggctgttgcagccagtgtcgaacagggcgagccgttgccggacagcatcctgcgcgcaaacatttaaccttgtaggagcccggcttgccggcgatggcgatcttgaagacgccatcgccggcaaggcaatgtgtcaggcttccaggcccaacatatcccgagccaacgcctcggcaatccgaatcccatccacgcccgccgacagaatcccaccggcataaccagcaccttcaccggcggggaacagtcctttcacgttcaaactctgcatcgattcgttccgggtgatccgcaacggtgatgaggtgcgcgtctcgatgcccgtcaacaccgcgtcgtgcaacgagtagcccttgatctgcttctcgaacgctggcaacgcttcacggatcgcttcgatggcgaagtccggcaaggccagggccaaatcgccaagagacacgcctggtttgtaggaaggctccacgctacccatcacggtggaaggcttgccggcgatgaaatcgcccaccaactgtgccggggcttcgtagttgctgccgccgaggatataggcgtgggactccaggcgttcctgcaactcgatacccgccaacgggccgcctgggtaatccacctctggggtgatgccgaccacgatgccggagttggcgttgcgctcgttgcgcgagtattggctcatgccgttggtgaccacgcggttcggctcggaagtcgccgccaccacggtgccgcctgggcacatgcagaagctgtagaccgagcggccgttcttggcatggtgcaccagcttgtagtcggcggcaccgagtttcgggtggccggcgtatttgcccaggcgcgcggcgtcgatcagtgattgcgggtgttcgatacggaaccctaccgagaacggtttggcttccatgtacacgccacgggagtggagcatgcggaacgtatcgcgggcactgtgccccagggccaggatcacgtgtttggagaggatctgctcgccgccatcgatgacgacaccgttcaactggccgtcttcgatcagcacatcggtcactcgttgctcgaagcgcacctcaccgcccagggcgatgatctgctcgcgcatgttttccaccacgccggtcaggcggaacgtaccgatatgcggtttgctgacgtagaggatttcttccggcgcaccggccttgacgaactcgtgcagcactttgcggccgtggaatttcgggtccttgatctggctgtacagcttgccgtcggaaaaggtcccggcgccgccttcaccgaactgcacgttggactcggggttgagcacgcttttgcgccacaggccccaggtgtccttggtgcgctggcgcacttccttgccacgctcgaggatgatcggcttgaagcccatctgggccagcaacagcccggcgaagatcccgcacgggccaaagccgacgacgatcgggcgttcggtcaggccttgcggtgcatggcctacgaccttgtagctgacatccggcgccgggttgacgttgcggtcatcggcaaacttgagcagcagggcggcttcgccctctacgttcaagtcgatggtgtagatgaagcacagctccgacgacttcttgcgcgcatcgtagctgcgtttgaacagggtgaaatcgagcaggtcatcactggcgatgcccaggcgctgcacgatggcaggccgcaggtcttcttcgggatggtcgatgggcagcttgagttcggtgattcgtaacatgacgggatccggtaggcggcgggcagagaggccggctgttttgcaaaccggcgattataagctccaatgaccgtttcccgtcatgttaaaacagcatggcgtcgcgtcagtcgtcgcgcgagccgccgaacgatgcgcaaccgcgctgtacctggccattgacgcgcaactcggcggtcatgtgctgcaaactgccactgaccgggtcgacacaacgctgcggcgctacccacaattccacgtgctgattgttggcctcggtcatcaggttgaagcggccgtcaccgatttgctcttccacataaggcacggccagtggcggctggccttcgcgatccagcaccaggcccttggcggtgacgttcatcacccaggtcggcttgtggccgttggcgcgcaggatcatgcgcttgaagtccgggtcgccgcaggccgaggtggagcgttcgacgcggtagagttgttgcaggtcgacgctgccctcggtgccgctggcaaccccggagaacttgccgcgcaggtcggcaaacaatgcgccttgctggccggccagggaggccgcttcctgcaggatgctggtgccaccggtgtcattgaccacatagttgcgtttgtcgttgcacggctggaacagcagtttgccgccgaccgcagtgagttcaccctgcatgcgggtcagcccggcgagcgacggcttggcaggatcactctcgaacatctggcaggcagcgaacagcggaagcagggcaaacaggaatagggtattggcggcacgcattatcgggtctccagacaagtgccgccacgttacgcaggccggcgctgcatcacaagcccatgacatagtttgacgcaggtctgcctgcggtcggatcaggaatattcgtacaggcgggtcgaggcatgtatgagagcgtcattttttcgataggagaaaggcgatgggctttcgacggtgtctctgtggttttttgctggtagcgagttctgcgctggctggcgagccggcgcgggtggagttttcgtccgccaccgattttgcggcaatcaccgttgacctcaagcaagacctggcgagcaacccgggcgttgtctgggtcgatgtagagttgagtccgcaggcgagggcgcgtctgaaggcgatctcgttgttgacgatcaaccaacgattgagcatttacgtcgacggccttgcgatgagtgcaacaccatctgtcgtcagaagtgttctggatgggttttacgtccgaatgggcgtccctcaagacttgttcatcaagtgggtgccttgggggcgccattagcggccgggaatcaacccacgataaacgtctgaccggtctgtaatccctccacacttttggcgtaggccaatgccacgtcggctccagcagccggtttgtagccacggaaatacggcgcgtagctgcccatggcctccaccagaaccgtcgggctgacggcgttgacgcgcaggccccgtggcagctcgatggcagcggctttgacgaacgcatccaatgcaccattgaccagtgcggccgaggcgccggtgcggatcgggtcgcggttgaggatgccgctggtgaaggtgaacgaagcaccatcgttggcgtactcacggccgatcagcagcagattgacctggcccatcagcttgtcacgcaagcccaactcgaaatcgctctcgctcatttcgcccaatgctacgaagtttacgctgcccgccgcacagaccagggcatcgaacttgccggtctgctcgaacagcttgcggatcgacgcgctgtcgctgatatccacctggaagtcaccgctgctgcggccgatgctgatcacctcgtgacgctgagccagttccgccttgaccgccgagccgacggtgccgctggcgccaatcaataggattttcatggtgctgttcctctaggggtaagtgaaggttcagtctagagtggctttttgcttggataaacgcactaataggcaacctttggttttcttttggaaacaatccatgagcgagatggatgacttggcggccttcgccgtgttgatcgaagccggcagttttaccgtcgccgccgagcaactgggctgtagcaaagggcaattgtccaagcgtatcagccagctggaagcgcggttctctgtggtgttgctgcatcgcaccacgcgcaagctcagcctgaccgcagccggtgcggccttgttgccccaggcccaggccctggtggtacaggtggatcgcgcccgtcaggcattggcccggctcaaggacgaccttgccgggccggtgcgtatgacggtgccggtgtccttgggggaaaccttttttgatgggctgctgctggagttttccaagcaatacccgcaggtgcagatcgagctggagcttaataacaactatcgagacctggcgcgagatgggttcgacctgggggtgcgctccggctccattgagaacgagcgcctggtggtcaagccgttgctggcctggcgtgagatgacctgcgccagcccggcttatcttgagcaacacggcgaaccggcgacgccagccgacctggccagtcatgcttgcctgctcaacagccactacagcggccgtgaagagtggttgtaccaccaacagcacgagttactgcgggtacgagtcagcggcacgtttgcctccaaccactacaacctgctcaaaaaagccgcgctggtgggggcgggtattgcacggttgccgtcctacgtgctgccggcggaattggcagatggccgactgcgttggctcctgcgcgattatcagacgcgcagcatgccgatgtacctggtgcatccttatcagggcggcttgccgcgtcgcacccaggtgttggccgactacctggtggattggttcaagcgcagcggcgaagccctggaccgcctttaacggtagcggcgagcgatcaggtgatcgatcgacaagcgacccgggcccttggcgaccagcaacagcaataacgcgagccaggtgccatgggttgggtaggcgtccgggtagacaaacaattgaatggtcagggtcatgccgaccagggccagggccgagaagcgcgtggcgaacccgacaaggatcagcaccgggaaaaagtgctcggcaaacgcagccaagtgcgctgcgacttccggcgatagcaacggcacatggtattcgctgcgaaacagcggtagcgtcgaggcggccaggcgcggttcaccgaattggaaggtgccgttgaccaggtctatggcaaagccttcgactttggtttgtccggatttccagaacaccgcggcaatcgaaaagcgtgcgagaaaggcgatcaggctgtagggaatttgctcgaaaagcgcgatgacctgattgatcaggcccgaagggcgagtgttcatggcgataccttttgttctggatgcaaatgagtaatggcgttgtggctgatcagcagcgccaggcattggtgcaggtcaaactcggcgccggcctcaagcgcgtgctccacggcgttttccaaggtcgcgccgcgggccaggttgttgatgaacgcgacagcatcaggggtgactgcgaataccttgacctccagaccctggcgcaacaccagggcactctgtggctgccagggatccaggttttccaggctcccctcggtctggtgtgccgcccacagcgctactactgcataggctgagtccagcgtggccagggaggggtgccattgcaggcgcagcccacccaggtccgtttgacttcgcagtgcctgtaatacggtctgttgatccaggggttggctgtctgccgcgtggtaggcctgtacccgcaagcgctccagccgggccatgtcggcgagataaggcacgctggctgccggttcgaacccctcgatgaagcaggcgaacgcgctaccgtacccgctcatcaatgggctggtgggcgggtgcgcctgtgcataaaggccggccatcgcgcggaaaaacgcatcgcccaccaactgcaacgtcacgggataagccgcagccaacgcgttgaccaatgagctgtgcacattgttgcggtacaccgcgaagcggctggctggctcggcgccattgctgctgaacaggccgtcggggcaaggcaggtccggtgccaacaaggccgcggtgaaggcgtcttgccggctcatggggtcacctgtgaaagatacctgtcagcttgccgggcctcggcttgcagcacgctgaacgcgggcaggtggttatcccgctcgatcagcgttgccactggaccgatgcgcgccagtaccgactcgtagagttgccacacggcgttatcgacaggggcgccgtggtcatcgatcagcaagcggtcgccaaggctgtcggtgtcttcggcaaaccccgccagatgaatctctgccaccgcgtgcaacggcaaggcatcgatgtaggactgcggatcacgttgatgattgatgcacgacacgtagacgttattcacgtccagcagcaagccacagccggtacggcggatgatttcgctgatgaagtcggtttcgtccagggtggagcactggaattgcaggtaggtcgacgggttttccagcagcatcggccgcctgagtgtgctttgcacctggtcgacgtgttcgcatacccgttgcagggtggcgtggtcgtaggccaggggcagtaggtcgttaaggaacaccgggccgtggctggaccaggccaggtgttcggaaaaggagtgaggttggtagcgctcgatcagtgccgccaaccgtgccaggtggtcacggtccggcggggcttcgccaccgatggacaagcccacaccgtgcaaggacagcgggtactgcgcgcggatcaaccccaggtaatgatgaaaagggccgccggccaccatgtagttttcggcgtgcacttcaaaaaaaccgatatcgggtgaggtctcaagcacttcaacgaagtgctcatgcttgagccccagtccggcccgaccgggaaggccgggcgcctgagcctgggagacggcttgcagggatgaaagagtcatcatcagtactcaggttttgcgagggatcaggatttagcggtgaaggccgcttcctggccgaaaccggtcggcgaggtggagcttggggttttgaggcaggtgccggcagggaccagtttccaggcgttggcctggtctttgactttcgaggtcccggcgcaggaagtgccggcgcccgcggcgcaatcgttcttgcccgcttcagcgacgccgaagcatttctgcatgtcgtcggcagcgtgggcggtggtggtcagagtggacaggctcagggcagaaccgagggccaggacgagggtagcggcagacagtttggtagtcattgtgtatctccagcagtgggttgagttggcgggcttgagtgcctgcttgtaccactagagacggcagggtggaatccgttacaagtcgatcaaaaataatttcaggcgacgcgaaacaaatatgggaggggcaagcccctcccacatttcagagccggttcgcctagccgccgaggtacgcctcacgcaccttcggatcggtcagcaactgctcgcccgtgccctgcatcaccacccggccgttttccagcacataggcgcggtcagcaatcttcaaggcctggttggcgttctgctccaccaggaacactgtcacaccgtccttgcgcagttgttcgatgatgtcgaagatctgctggatgatgatcggcgccaggcccagggaaggttcgtccagcagcaacagcttgggcttgctcatcagcgcccggccgatggcgagcatttgctgctcgccgccggacatagtgccgccgcgctggctgaagcgttccttgagccgagggaacaggtgcaacaccttgtccatctgctcctggtagtcgcccttgtcggtgaagaagccgcccatggcgaggttttcttcgaccgtcaggcgcgagaacacgcggcggccttccggcactaccgcaatgcttttacgcatgatgtgggacgactgctgccccaccagctcttcacccatgtagcggatgctgccgctatgggcctggggcgacccgcacaaggtcatcagcagggtcgatttgccggcaccgttggcaccgatcagcgtaacgatctcaccttggcgcacttccacgttgacgctgtgcagggcctggatcttgccgtagaaagtggaaacgttttcgaattgcagcattttacgcttcccccaaataggctttgatcacttcaggattgtcgcggatctgctccggtgtcccgtcggccagcggcgtgccctggttgatcactacgatgtggtcggaaatgctcatgaccagcttcatgtcgtgttcgatcaacagcaccgtggcgttgttttcttcacgcaacacgctgatcagcgccttgaggtcttcggtttccttggggttcaggccggcggccggttcgtcgagcatcaggatccgcgggcgggtcatcatgcagcgggcgatttccaggcgacgttgctgaccgtaggccagggtgccagcagggcggttggcaaactcggtgaggttgaccttgtccagccagtactcggcgtattccatggcctcgcgctcgctcttgcggaacgaaggggtcttgaacagtcccgcaaagaagttggtgttcaggtgacggtgctgggcgatcaacaggttctcgaccgccgtcatgtccttgaacaagcgcacgttctggaaggtccgtaccacgcccttgcgggcgatctcgtgaccggccaggccctggatcggctggccgtccagcaggatgctgccaccgctcggcttgtagaagccggtgaggcagttgaacaccgtagtcttgccggccccgttggggccgatcagcgcgactacttgtttctctttcacggtcagggccacgccgttgaccgccagcaacccgccgaagcgcatgctcaagttttcgactttcaggatctcgcggctcatttgcgcagctccatgtgtgggcgttgcatcgggagcaaaccttgaggacgccagatcatcatcagcaccatcatggcgccgaacatcaacatgcggtattcgctgaactcacgcatcatttccggcagcaggatcatcacgatcgccgccaggatcacgcccagttgcgagcccatgccccccagtaccacgatggcgaggatgatcgccgactcgataaaggtgaacgactccggggtcaccaggccttggcgcgcggcgaagaagctgccggcgaaaccggcgaacgcagcgcccagggtaaaggcggagagcttgatgatggtcgggttcaggcccagtgcgcggcaggcgatctcatcttcgcgcagcgcttcccacgcacggccgatgggcatgcgcagcaggcggttgatcacgaacagcgcggctaatgccagcagcagcgccaccaggtacaggaacaccactttgctcaccgggttgtagtcgatcccgaagtactcgtggaacgtctgcatgccttcagcggcggaacggtcgaacgacagcccgaagaacgtcggcttggggatgctgctgatgccgttggggccaccggtgatatcggtgaggttacgcaggaacaggcggatgatttcaccgaagcccagggtcacgatcgccaggtagtcgccgcgcaggcgcagcaccggaaagcccagcaggaagccgaacgtcgccgccgccatgccagccagtggcaggcagacccagaagctccagcccaggtaatgcgagagcagcgcataggtgtaggcacccacggcatagaagcccacgtaacccaggtcgagcaggccggccaggcccaccacgatgttcaggcccagacccagcaacacgtagatcaggatcagggtggcgatgtcgaccgcaccgcgcgagccgaagaacggccagatcaacgcggcgatgatcagggcaatgatgatgtagcgctgggtgcgcggcagggtcaggaattggctgaccttgggcgataccaacggaccacggttgctcttgagcaaggcattgaactgatcgctgaacaacacgcgcaggaacatcagcaccgaacacagggcgatgacggtcagggtcacgggacctgtgccatgcacttcaaggttgatgccgacaatgctcagcttgaggccgagtaccgggaaggccacggcccataccagcaaggcgctgaaaaacgccgatttaagatatctgctcatactttctcaacctccggacggcccaggatgccggtcggacggaacaacagcaccagaaccaacaggccgaacgccacgacgtccttgtattggtcaccgaagatatcggcgccaaaggcttcagccacccccagcaccaggccaccgagcatcgcgcccgggatactgccgatgccgcccaataccgccgcggtgaaagccttgaggcctaccaggaaaccggcgttggggttgatcacgccgtactgcatgctcagcagcaccgccgcgacggcggccagcgcagcaccgatcacgaaggtcagggcgatgatgttgttggtgttgatgcccaacaggttggccatcttgatgtcttcggcgcaggcccggcaggcacgccccagacgggagcgggagatgaacagggtcaggcccagcatcgccaccagggtgacgacgaagaccaggacctgcatgtacgaaatcagcacttcttgtgcgccgcctgggccgaaggagaagctccccggaatcaggttgggaatggacttgtccttggagtcctgggacagcagtacagtgttctgcaggaaaatcgacatgccgatggcggaaatcagcgggatcaaacggttgctgccacgcaagggacggtaggcaacgcgctcgatactgtagccataggcactggtcacgacgatcgacgcaaggaacgcagcggtcatcaacagcggcagggagtggatacccagcatggccagcccggcaagggcgatgaaggccacgtaggagccaatcatgtacacctcgccatgggcgaagttaatcattccaatgatgccgtaaaccattgtgtagccaatggctatcaaggcataggtgctgccaacggtcatgccgttaaccagcgtttggaaaaaatgatagatctcaggcattacagcgctcctaaaaacccgatacgcatttcactggtggagtcatgttccggccctgcactgtgttctgtgagcacatttgcacaaagcgtttgccagcgaaccgctggtgacggttttaagattttcaggtgagccagcgcccggatcgcgggtgtcaggcccataaacctcgtaaaacaaagcccactgctttcacagtgggcttgctggaccagtaatgcctggcttactgaggggaaacttcggtttttggtttaccgaagtgccattcgtagaccacgaacttgaagtccttcaggtcgcccttggcgtcgaagctcaggtcgccggttggggtcttgaaggtgcctgcgtggatggcagcagccactttggcggtgtcttcggacttcgcggcagcgataccgccggcgatgacttcaacagccgagtaggccgggaacacgaacggaccggttgggtcctgcttgttcttggtgaactcttcaacgatcgccttgttggctggatcggtgtcgaacgacttcggcagggtaaccagcaggccttcggaagcgccctgggcgatttgcgagatggagtcgttgccgacaccctctgggcccatgaacttggcgttcacgcctttttccttggcctggcgcaggatcaggcccagctcagggtggtagccgccgtagtagacgaagtcgacattggcttgcttgagcttctgaatgagcgagccgaagtctttgtcgccagcgttgatgccttcgaagagggcaactttcacgcctttcttctctagggtctgtttaacggcggtggcgatgccttcaccgtactgctgtttgtcgtgaatgacagcaacgacttttggcttcacgtggtcggcaatgtagttaccggccgcagggccttgggcgctgtccaggccgatggtgcggaagaccagtttgtaaccacgggaagtgatttccgggctggtggcagccggggtgatcatgatcacgccttcgtcttcatagatgtcggaggctggctgagtggagctggagcagaggtggccgaccacgaacttgacgccgtcgttgaccactttgttggccacggcaacggcttgtttaggatcgcaagcgtcgtcgtactccttggcttcaagcattttgccgtcgacgccgcccttggcgttgatgtcggcgatggcttgcttggcacccatgaattgcatgtcgccgtattgcgtcacaggaccggttttaggacctgcgataccgatcttgatggtgtcggctgcgaacgaatggccggcaaccccagccaggaccatagcggcaaacagtttggaaatctgcttagtagccttattcatagtgctccactcttactgttgtattttttatagttctagcggccttgtgagctgcagaaccggatcagatatctcggatatccccccggcagtgccctggcaactgtaccggtacagtgtagagcgccggttgatcgcttgaaaagctggctgctgggggcaaaacccgggtatgtcgcttaaatgaaagaaaaagacagaattgcggcggggtgatgccagagtttcgggcaatccttggctttcctgacactttcaatcgatgacgcatttgcaactgggtttttctgcctgacgctcgacgttatgattgcgccgattttttattcaggtgaactcccatgacgcaagaacctagcaccctctatgccaagctgctcggtgaaactgccgaaatttcctggaaggagcttgagccgttctttgccaagggtgccctattgtgggtcgatgcgggtctggatttgatcgaagcagccgaaggcatggccgaggataaccgcgacaaagtcgccgcttggctggctgcggggagccttggcgaagtgtctgcgacgcgggcattggacctggttgagcgtgatccaagtttgtgggcggtggtggtttcgccttggatactgatccaggaaagggcggcgtaaagaatgagcgcactaaaaaggtgcgcaattcaggctatcagaagtgtgtagcggagtaaccgccggcaccgtgatggcaccttgccgtagagaaaggtcacaggtgagggtgacgtaaacgtcacgggaacagttatacccgtggcacaagcgctgcaaaattgtttcccgatatgttcgcatccccctgcaggagccggtgatccggctcctgcaggcaggtcaggcggtcttgccagtgtggttgttcagcgagatcaccttggtcttgccaatccggtggcggtagatctcacgcaagtacttgatcgccttcttcacgcaatcccgtgacaggcgaatgtcattgatcgacacgaacttctccttgtcgttgatcaactcgcggtacttcttctcatacatcggcttgatcgcgtaccagttggtgtcgaggatcttcgccgggttctcgaactcgttgagcaactcgtcgatacggtcttcgtcgaagtcctcgtggatgatgaagtccaggatcgagttgtccagcgtgtcatcgaagcgatacgggttgcgcgcaaagcagcgtttgatgaaggctacgatcaacgtgaggaagtcatccgacaggcacgggctcttggcgatcagggtggtcagcgacaggttggccgaggcgccgatcaccagggcgtagcgcttgagcgtggtgttggggaacaggctgttgaggtgggtcttgagccggttcaagtccatgtaggacagcttgtagtccttgggcagtgacacaatcgagaccaccgacgagcagttcttgaagaagtgcaggtcatgcagcgcggcggcgtcgtagccagagttcttgtactgttccagggacgccttgtagcgcttggattcgatcggcaacaggctgatgccttcgatggcctgggtgaccttgttgaagtgcggcaggtcgatggaacggaagaacaggtcgtcgatgttcaggcgctgcggctctttctcgaacaccttgaatttgtcatttgacggcgccggggtttccgggaccacggactctgcgtaggcaatcgccactgggccggccaggctcatgaacaggtcgttggcatccaggcgaatggtttcgccgatgtcgatgccggcgcgccggaaatagttctggtcgtagtcggtggtcacggcctgggcggtgaggatgttgaagatctgctgggaaatgtactggttggcgtgtttttccatggcattgacgtcaatgttctggatattgccgtcatcgctttcttcggcataacgcatgatgtcgttggagatcagcatcatcgcgttccacggccggattcgccccttcacgctggcttcgctgctgtcttcattggcgaagttgtacgaaaaatcccattcttccgacaggtatttgcacagcagtcgcccggcgttgatgtgcagcgcctcggacatttcgctgcggtggtcggaaatgttcggcagcacgcagatgccgctggtgaagatcggctcgaacacaaaggcgtggccgctcttgctgtcgtgctcatcggcgggcttggtgtcgaaggtcttgttcatgtacgagtgttgctgggccaggccgaattccgaagccatgcctgaacctgtgccgccgccggcgctgaagatcgagaagtacaggcgcgactggttggccttgatgccgcaggagtcgatcaggtacgagtggatcatcttccagtcggggctggaaaaacgctgggtgtctttgttcaggatgatcttggccaggtactggccgaggatcggcgcattgccggcgccgccggcatggacctccgacaggtccatgattttcatcttgctgtagtcgcgcaggaagccgcttttctcgcctttgcgcgagaagcggatacgcccggcgatgtccttgtccaagtcgcccagcatcaccagcggctccaccaggaacaccggtttgctggccttgccgctgcccaggcgcaggttgttgcgcagccactgggccgggctgtagcccttgtcttgtgacttgtcttcgttgctgaattcgttcaggtagaacttgcgcgcgttgtacaccagttccgccacgtccagcgcgatgttcgaaccgcagcggcccaggccgatcaggcacaccgaggggaattcctgttcgttgcgcggatcgctgtcgccttccaggtggggcggtcgcgggaacaccatgtcgcgcaggccgtcgagattgtcgaggatgcggtcggtattggtctcggtgaagtacaggtattgctgggtggccagcgggcgggcggtgctcaatgactttgaacctgagggtgtgtccgcaggagctgggagcaacacgtcggataccacggtggcagagttatttttagaagtcattgtgcgccatgtgcctgggcggatggctgaagagaatcaaggggccatcacggaatgggtgttcgcgactttacagtgcgtccttgtcctggacgattgggttttaccccgatgatttcagggaaaacacggccggactctgatgaatcggccgttcgtcggggttctttaggcaaatgatggcgaaatgccaaagattgggcgtcagcgaattggcctgacgatggatgtggagccgccgcggcctggggaatgctctttgggtgcgctgctgtccttggcgccctgcgtgctgtgcgggtacagcgggttacgcaggctgatgccctgcatcacgcccataatgtcactggccggcacggccgggctcagcaggtagccctggacgaagtcgcagccatgcttgagcagcagctcgaactgggcctgggtttccacgccttcggtcacgacttccaagtgcagggtatgggccatgccgataatcgcctggacgatctcgatatcggcggtggacttgggaatatcctggataaacgagcgatcaatcttcaacgtgttgagtggcagccgcttgaggtaggcgagggaggagtagccggtgccaaagtcatcgatggccagcgacacgcccagcgcgcggatttgccgcagcaacgccagggtgctgctgatgttgcccatcagcgcattttcggtgacttccagttccaggcggttcgcgccgatcccgctgaagcgcaaggcgtcttcgatttcgtccgccagctcgtcacgggccaggttcagcgccgagcagttcaccgccatggtcaggtcggtgtagccccggtcagacagcaggctcaggtcatgacacgcctggcgcagtacccagtggtccagttcggcaatcagcccgttgctttcggcgatgccgataaaccggtccggcgccagcaacccgtgctggggatgctgccagcgcaccaaggcttccaaccgtgtgaccttgcccaatttcatgtcaaagatcggttggtagaacaacaccagttggttgcgggtgcgcagtgcgctgcgcagttcttcctccaattgcagttcgaggaaggcacgggtcttcaggttggagctgaagaagttcaagttgttacgcccggcgtccttggactggtacagcgccaggtcggcagttttcagcagctcttcgcaggtcaggccgtcatcggggaacaggctgatgccaatactggtggtcatcaccatgcgccggccggccagctcgatgggttctttcatctgctgcatgatgcgctgggccaggtgccgcgcctcgtcgcggtggtggatgctgatcaggatgcagaactcatcgccgccaaagcgcgccaccacatccgcatggctgcgcactgagcccttgatatgcccggccagcacggtgagcagctggtcgccggcgtcatgcccgaggctgtcattgatgcgtttgaagtggtcgatatcgaggaagatcaccgccatcatgccgtttgacgcggttttttcggcgagcttctcggcaaagatctgattgaaaccgcgacgattgagcaggctggtgagggcgtcgtaatgggccacctgttgcagcgacgcgcgggcctggtcgagttcgctgagcagggcgttgacccgccgcaggtcgcgttccttgtgctgcagttttttgtcggccagggcggcgctgatgctgctgccgatcaccagcagggtgatgacggccaccgacaagcccagttgaatggggttgttatccagtggcaacgaaaggtcggccccgttgggaacgatgagttgcatggccgccatgccggtaaagtgcatgctcaggatcccggcgccgagtaccaggctggcggcatacttgagcagttgatggaacacaccggcgccggtacgcaggtagctcgacagcaacagcgcagccaggctggcgccgatagcgatacccaccgaggccatgaacagtccagactcgaaatagactttggcctgcgagcgcatggctgacataccgacgtagtgcatcagggcgatgccaatgcccatccacaccgacgccagcaggtactggtggaaacgcaggttggaatgactgagggtctgcatggcgaacaacgaggcgaccaacgcaatcaacagcgaagcaaacgtcatcaacaattcgtagtggattgcgatgggtgcctggaaggccagcatgctgatgaaatgggtggaccagatcccgcctgccaggcaaccggcgccgagccagcgccagtggcgtctggcggtagggtcctcgacatggccgacacgttcggccatatccagcgtgccgaagcccgccgcgcaagcgaccagataggcgagcagcaccagaaaggggttatgactgcaattgagtaataagtgcccgctctctggaagctcggtaaaaaaatgcagacctagccattccatagcatgtcccgtcatagagtcacgtcactgcctgaggcgatgacctatgaggtcgagtatagaagcgtaggaaaattcgcaaggaataatggcactttgcttcgctacgattttggcatgccgtccatagcgtttgatgctaagcgctgatgggcaggtccaattcgataggtgcttccaatggcgccaggccaaaggcggcgcgtgctgcatcgcaatcggcgttgtgcacgccgtcgtaccacgaggactcgaactcacggcacacgcttgagcgttgttcgtagatcgtgcagcgggtgccttggcccacttcgccctcaaggctgcagcagcgcgcgggtttctggtcggtgccgatcatggccacgcgggtcgggttgatctgcaccaccaggtcatcgggcaccgtgccccccgacgaggcgcactcaccccagaagaaagacacacgaaagtgtgaacagcaggcaccgcaattcagacacggactggcttcggacatgggcgtcatcgataagaaaagtaggttggggatgctacggaaggctcgccattctatccgtgccatggccattgggaaggggggcgcgcacttatatttttgtggggaaagtcccgtgttgccgggcgaaatcatgccctatcagctttacgaatcattacagacaaccgggccctgcctgactatgttgcaggtaccgggcaggatgcatcgggcatcgcagctctcataacaataaaagagacggacccatgcagaactcgacccaagcggcgaatgcctggcgcattctgttcctgctgttcctagccaacctgttcaacttcttcgaccgcaccatcccggcgatcatcatcgagccaatccgcatggaatggcacctgagcgactttcagctcggcatcatcggcaccgccttcaccatcgtctacgccattgccgggctgccgctcgggcgcctggccgacaccggctcgcgcagcaaactgatgggttggggcctgttcgcctggagcgggctgacggcggtgaatggtctggtcggcagcttctggacgtttctactggtgcgcatgggcatcggcattggcgaagccagctatgcgccggccgccaactcgctgattggcgacctgttcccggcacaccgccgtgcgcgggccatggggatcttcatgctgggcctgccgttgggcctgttgctggcgttcttcaccattggctggatggtcaaggcgttcgacagttggcgtgcgccgttctttatcgctgcggtgccggggctgatcctggcggtgttcatgttctatatcaaggaacccaagcgcggcgcggcagagaccgtacaagtatcccaggaacgcgtcgaccgcccgatccgccgtgtgctggcggtgccgaccttcctgtggctggtgctggcggggttgtgcttcaatttcgccacctatgcctgcaactcattcctggtgccgatgttgcagcgttacttcctgatgccattgcaggatgctgcggttgctacgggtgtgattgtcggcctgaccggcctggtgggcctgaccctgggcggctggattgctgacaaaatccatcagcgggtcgccaatggccgcctattgtttgcggcgttcagcctgatcatctctaccgtgaccaccgcgtgggcgttacacgccgggcgcatcgagattggtgtgtttgtggcgttgttcagtgtgggctggttgttcgcttataacttctacacctgcgtgtatacagcgatccaggacgtggtcgagccgcgcctgcgggccacggcgatggcgctgttcttcgccggcctgtacttgctgggcggtggcatggggccgatcgtggtgggtggcttgtccgaccactttgcccattcggcgatgtacgcggcgggggcagagcagatgaccgaggcttacaaggccgtgggattgcacgacgccatgtacctgattccggtggcgttgtttttgaccatgctgttcctgttccaggcatcgcgcagttttgtgcgcgatgccaagcggatgaaggatgggctgggggcggttgaggtgccggcttcggcggtgaccgcttgatattgaggtgacgccatcgggggcaagccccctcccacatttgactgggttgtcatatcgatcaccgatcaattgtgggagggggcttgcccccgatggggcctcgaaggccaataaaaaaggcccgcattgcgcgggccttttcatttaacagggcagggcagtgatcaacccgccaccaacacccggatcgcttccaagcgcagcgccgccttgtccagcatggccagaccttgctcgcgctgattgcgcagggccaccaactcactgtcacgcacggttgggttgaccgcttgcaacgcagtcaggcgcgccagttcttcgtcggtgtccgccgccaggcgacgcttggcctcggccacgcgttcggcatgttgcggagtgatcttctcttcgccggcgttgatccgtggcgttagctggtcgcgctgggcctgcacgaacttgttggcgctggcgcgtggcacgctttccagctggtcgttgagggtcacgaatgacacacggctcgacagatcgttgccattggcatccagcaggcagcgcagggcggccggcggcaagtagcgccccaattgcagtgaacgcggtgcaactacttcgctgacgtagagcagttccagcaacaccgtgcccggcttgagtgccttgttcttgatcagcgccacggccgtgttgcccatggaaccggacagcaccaggtccatgccgccctgcaccatcgggtgttcccaggtgatgaactgcatgtcttcacgggacagcgcctggttacggtcgtaggtgatggtcacgccttcgtcgtcgcccagggggaagctggcgtcgagcattttttcgctgggcttgaggatcagcgcgttttccgaatggtcttcgctgtcgatgccgaacgcgtcgaacagggtttccatgtagatcggcagggcgaactggtcgtcttgctcgaggatgtcttcgaccagggcatcgccttcaccggcgccgccggagttgagttccagcaggcggtcgcgaccggtgtgcagctcttcttccaggcgctcgcgctcggcacgggcctcgtcgatcagggcttgccactcgccatcgtcggcgttttccagcagcggcagcaggcgcgggccgaactgatgctgcaaggcgttgccggtcgggcaggtgttgaggaacgcgttcagcgcctcgtggtaccactggaacaggcgctcttgcgggctggtttccagatacggcacgtgcagttcgatcacgtgtttctggccgatccggtccagacggccgatgcgctgttccagcaggtcggggtgggacggcaggtcgaacagtaccaggtggtgggagaactggaagttgcggccttcactgccgatttccgagcagatcaacacctgggcgccgaactcttcatcggcgaagtaggcggcggcgcggtcgcgttcgaggatgttcatgccttcgtggaacaccgtggccggaatgccggagcgtacgcgcagggcgtcttccaggtccatggcggtttcggcgtgggcgcagatcaccaggaccttggtgcgcttgagcattttcagttggtcgatcagccattcgacccgtgggtcgaagcgccaccagcggttttcttcttcgacgtccggctgcgactggaagctgacttccgggtacagctcggcgtgttcgcccagcggcagttccaggtactcgtccgggttcggcagcgggtaggcgtgcagcttgcgctcggggaagccttgcaccgcagcgcgggtgttgcggaacagcacgcggccggtgccgtggcggtcaagcagctcacgcaccaggcgcgcgctggcttcggtgtcgccatcgttgacggcggtgagcagggcttcaccttcgtcgccgaggaaaccctggatggtcttgtgtgcggcaggggacaggcggcccttgtccagcagctcctgcacggcttcggctaccgggcgatagttctcgctctcggcgcggaaggcggcgaggtcatggaaacggttcgggtccagcaggcgcaggcgcgcgaagtggctgtcctggcccagttgttcgggggtggcggtgagcagcagcacgccgggaatcacttcggccagttgctcgaccagcgcgtattccgggctggccttgtcttcatgccacaccaggtggtgggcttcgtcgaccaccagcaggtcccaaccggcggcaaacagcgcgtcctgggccttctcgtcgtccaccagccactctagggccaccagggccaactgggtgtcttcgaacgggttggtggcatcgctttcgataaaacgttcttcgtcgaacagcgccacctgcaggttgaagcggcggcgcatttccaccagccattggtgctgcaggttttccggaaccaggatcaacacgcggttggcgcggcccgacaacagttggcgatggatcaccaggccggcttcgatggttttacccaggcccacttcgtcggccagcaagacccgtggcgcgatacggtcggcgacttctcgggcgatgtgcagttggtgtgcaataggttgcgcacgcacgccacccaggccccacaacgaggactgcaattggcggctggtgtgttccagggtgtgatagcgcagcgagaaccaggccagcgggtcgatctgcccggcgaacagacggtcgctggccaagcggaactggatgaagttggagagttgggtttctggcagggtgacctgctcgttttgcccattgaggccgtggtacaccagcaggccatcgacgtcgtcgacttcctgcacggtcattttccaaccttcgaaatgggtgatgctgtcacccggcgagaacctcacgcgggtgaggggcgcattccgtagcgcatactgacgagtgtcgccagtggccggatagagcacggtcaacaagcgcccgtcctgtgccagaacggtgcctaaccccagctctgcttcgctgtcactaatccagcgttgccccggttgatactgctgcgccatgctgcctgactcccgccgtgaaaaagccgactatcttaacggaacaagcccccacgcccaaggactctgacaaaaactactccgtttgcatggggggccggaagccgaatcgacgggtggcgggcacttgggagtgtcgactgggtcacaggttggcgagcctgtgctcaagtcaccctgcaacccgccgacagcctgttgatcaggagaataatcactatgctgccacccatgctgcccgtcagcgttgtgccggtcacgtcgcaactcgatccggtgcgccagaagccggacatcccgcccgtggtgccggtccagccgggctccaacgagagcaccatcgacctgaaaaagggcgatgccgagacgtcgacctttttgctgcgcgaagaacagcgccgccagcaggaacaacagagacgccggcgtgaagccgatgaagacccggagcagcacctggccattccgggcgatgtgttgaatgccgacaacaccgtgccagtggcgccgctgatcgaagatgcaccgcgccagggcctttgggtggacgtcgaggtttagtcgcgcaactcgcgcagggctgctatcagcaactcgatatcatgctcgttgttgagcgggctcaccgagatccgcgccacgctctccaggccgcgcgcctgcatatccagcggagtgtaggccgcgccgttggcgccgatattgatgcgcttcaaacccaggcgccgcttgagttcaaaggcatcccagccggccaggttgaaggcgataaggccggattggcgagtacccaggtcatgcagggtaatgcccgcaatcccacgcaacgcttcgcggattcgcgcgctggtctgcgaaaccctctcccacgcgcgctcgatgcccagccgattcatctcctgcagcgcattgcccagcccggccagcaaggcgaaggatgcttcgctggtttcaaagcgccgtgcgtcattgcgcaggtcgaaaccctggcccgtccagggcgccgaaaacacgtcgcgctgggccgggttcaggcgcccgaggaaatccggccgcacatacaacagcgccgtcccgcgtggaccgcgcagatgctttcttccggcggacttgagcacatcgcactgcaatgcttgtacgtctaccggcacctggccgacggcctggccggcgtcgataaagtaggggatggcgtgacgcctggccaattcaccgatggcctgggcggggttgatcaggccgccgttggccgggagccaggtgaggtcgatcagctttaccttggcatcgagcattgactccaacgccaccgggcagactgcgccgcttgcatcgcaggggatgacctccacgcgtgcacccgcttgcaccgcccgttccatgctggccaggttgccgccccattcgtgacggcctaccagaatgcggtcgccgggttgccaggggcccagggcctggaacgccaggctccaggcggtcgagccactgctggcaaatgcgatggacgaggtgggggcgttgagcagttgcgcggcggcgcggcgggctctttccaccagcacggcgccatgttcgccggcttccatcgggccgtcgcgagcttcccgttgcagttgctcgatgattgcatcaagggttgcctggctgggcagggaagcaccggcgtggttgaaatgcacgatgccggactggcagccaggcgtgtcatcccgcaggtgctggacttcaagcgggctcatgggtgcagctcgaaaatcgcatcaacctccacggccacaccggccggcagactggacacgccgacggcggtgcgcacatgccggcctttttcgccaagggcgttgaccagcaggttggaggcaccgttggccaccacgctctgttgcgtgaagtcgccgctgctggcgatgaatacacccaggcgcacggtacgcaccaggcgcgacaggtcatcgccgagggcattgctcaactgccccagcaggcccagcgcagcgagttccgccgcttgtgcaccttctgcatcgctgagggactcgcccaaccggcccacataggcgggtttaccctccaccagcgggatttgcccggagacgaacaggtgattctggctgaccacgtggttgatgtaattggcaatcggctggctgggggtgggcagcgtgaggcccagggcttgcacgcgttggcggagggagtcgctcatgatgaatcctcttgggtcgggaggcttcagcatgttggctgtattgaagggcgacaaacggatagatctcacacgacgtatcgaaaaaactcacgcgtcagtgcaggtttccttcagccactggctgaaacatgcggcggcttcgctaggggtgccttgaggtgcgatcagccagtagccgatgtcgctgtgatagggcggccaatcgaaggcctccaccaggctgccgtcctgcagcctgcgctcgatcaggcgatgacggcccatggcgatgccctggccggccacggcggcttcgaccacaatgttgtagtcgtgcagcatcacgcgggggtgctggccgaggtcgacctgatagtgctcggaccagtcggtccattcaaaggggcggtgcgaagtggccatcagcaacgggctgtcttgcgctgccttgaacgtcgggctgcacaccggcgagaggacttccggcatcagtcgcgtggcctgcacatcgggccaatcgcccttgccataacggatggccaggtcgacctcggcgcctgccacgtccgccagttgaatggccggcaacagctccacctgaatatgtgggtagcgattgaggaagccggccaggcggggcgccagccacaaggtcgcaaaggaggccagcaagccgatgcgcagcacggtggcactgggcgtgacgcgttgggcacgggtggcggcggcgatggcgtcgagggctgggcggatttcgtcgtagtactgttggccgtcggtggtcagatcgatcgctcgggtgcgtcggataaacaagggtttgcccaggtgctgctcaagcttttgcacctgatggctcagcgcgctctgggtcactgacaactcgctggcggccttgataaaactcaagtgccgcgccacggcttcgaaggcgcgcagcgccagcagcggcggaaggtccttgtgcagtgccacctgggtgcctctcctggttcggaaaaatagcgattttgtgcgatgacctgccttttgtcgcccgctgatttgccgttgagcgggggaggccgcattattggaccattccctccacgacgtaagccaagccatgagtgaagacgacaagctgatcgacctgaatgccgagcgcgccaagcgcgtgcatgacctcaatgacaaacgcctgaatgaagtccgccaggcatttgaacaggcaatgccactcggcaaagtgaagaaaaaaccgaagaacaaacccaaaaagcgttgaaacagcctgcatccattgatgcaggtcagttattgcccttctttacgccccgtcgcgggcgacattgatccccgtcaattttccaatccgccttctccattaacttagccctatcgcaacagggcaagtgcaggaggccggtcatgtttatcgataatgtggtgttcgccggagtgctgaccgtaagcctcatggtgatgttttttgtagggtttggaatttttatctggaaagacgcgaacaagcggaaaaaaccatagtttttccaggttacatgagcacgcaaggcattttgggcgacttcggtcgcccttttttttgcgcctgaattaacgcaatagtgatcggcataaaaaaaggtgcgaccctcgcggatcgcaccttttttatcgccggcggcttatcagctgcctagcgccttggaagccaaccagaacaacccggccgacagcgccacggttgctggcagggtcagtacccaggccatcaggatggtcttcacggtgccgccctgcaggccgcttttgttggcgaccatggtgccggccacgcccgacgacagcacgtgagtagtcgacaccggcagcgcgaagatgttggcaaagccaatcatggtcgcggtggtgatctgtgccgacatgccctgggcataggtcatgccctgcttgccgatcttctcgccgatggtcagtactacacgcttccagcccaccatggtgcccaggcccaaggccagtgcgacagcgaggatgacccagaatggggcgtattcggtggtggcggtcaggtctttgcgcagtttgtcgaggtcggatttctcacgggcatccaggcctggcagcttgccgacctttttcgcggtgtcgtccaggcagagcagatagcggcgcacttcaatacgctggtcagccgtcaacgcgtgatagtcggacacgcctttgagcgtgtcgaccagcgcgttgatggtcggctcggtctgctgcgggttgcactggaacttgccaggcaggtcgttctgcacgcttttgcccagggccaggaactcgccgagcgtggcgttgttacgctggtagaactggctcaaatgcacggtggcgtcgcgggtccgttcgatctggtaggtggtgctgcccaggtcgagcacgaattgcgccggtacgataccgatcagcaccagcatgatcaggccgatacctttctggccatcgttggagccgtgcacgaaactcacggccatggcggaaatcaccagcaccaggcggttccagaacggcgggtgtttcttgtcgtcgagcttgcggcgctggtccggggtcttgtgcatcttggacagcggacgccaccacttcaggccgatcagcaccagggctgcgacgaggaaaccggccatcggcgagaacaccagggaagcgccgatatccaccgctttctgccagttcacaccgtcagccaggggaatgtcgttgatcagggcgttggccaggccgacaccgaggatcgaaccgatcagggtgtgggagctggaggccgggataccgaagtaccaggtgcccaggttccaggtgatcgccgctgccaataaggaaaagaccatcgccaggccatggccggtgttcacattgatcagcaactccaccggcagcaagtgcacgatggcgtaggcgacacccacaccgccgagcaacacgccgaggaagttgaacaccccggagaagaacacggccaggtgtggcggcatggctttggtatagatgactgtggccaccgcgttagcggtgtcatgaaagccattgatgaactcgaaggcgaggacaaaggccagggcgagcaacaggctcacgagaacccaagcatccagtccgctgaataaatcgatcatgaaggttttctgacccggtcgtaagggggcgcgattatgccagaaaacctcagtaatcgatgcactagctgctcatcggtaacaatcttccgtgaaaaaaatcccggaaaaggcgtgcatcccagggttttcggggcttgggcaagtctttgatttatataggagagggcgctggaagcgggggattgtcacaaaaacgtcacggctgaaacatttgtatgaaattttaccgttcttggtagggtgcaagatttctggctgctagctaagtgccagcaacctgggccaaaaccttgatgctcaaaccgaatcgcttagggctcttcggtttttagttcctgttcaatcttttggatttcctgtgcaaatgcctggtcgagcaggctggcgcgcttgcgccatggtttgcgttcaggttcaggctgggcggcgtaggtggtgacttccccgccgtaaacgtccttgtaacgttgctcctggcgctcaagttccgcgcgcagttcatctttcgtcacatcgttacctaattgagttgagtgtaaatacgttgcagcgttatgccggaatgcgccctcggggtgtttcaagtcgaaccgccatagcgttcaagtttgaaacagacatgggtgaacacttgttagtgccgtcattcaaggcaggtagttgctatcgacgatgcacggcgtgtgcatcacgtggccagctccgttgccgataatgaaaccgggcggaccagtacacagggtgcattatagcggcgcatttgaataacactatcggtataaagttaaaaaccgtcaactttgtatgagtgttctgttacacgtgcctgttggtaattgcacacattcgggtgtcatgaatccatccgaacttcaggcgttaataagacgcctctggtttttttcaatccgccatgggtgaagggggaggttgcgagcaaattgcgataatcgaatgatcgtccgataatcgcacaaagttggcggccttgccttgtgcatctcggctgacgcggcttgtaatagtggccaaacctcccccgcggttgacaataagacaaaggatcccgacatgaacgatcaattgcgcaactctttcgcgtcagtggcgccgccgatcgttgcgtccccggccaagcgtatccaggcgtttaccggtgatccggacttcatgacctccctggcccgtggcctggccgtggtgcaggcgttccaggaacgcaagcgccacctcaccatcgcccagatcagccaccgcaccgaaatcccccgcgctgccgtgcgccgttgcctgcacaccttgatcaagctcggctacgccactaccgatgggcgtacctattcgctgttgcccaaggtcctgaccctgggccatgcatacctgtcctccacaccactggcggtgtcggcccagccttatctggaccgcatgagcgagcaactccacgaagcctgcaacatggcgaccctcgaaggcgacgacattctctacatcgcccgttcggccaccacccagcgtttgatttcggtggacctgtcggtaggcggccgattgccggcctattgcacctccatgggccgcatcctgctcgcggcgctggatgatgcctcgctgcaggattacctcgaccacgccgacctgcagaccaagaccagccgcaccctgaccacgcccgccgcgcttttcgactgcttgcaacaagtgcgtcagcaaggctggtgcatcgtcgaccaggaactggagcagggcctgcgctccatcgcggtgccggtgtatgacgcctcgggccaggtgctggctgcgctgaacgtcagcacccacgccggccgggtcagccgcagcgagttggagcagcgcttcctgccgagcatgctcagcgccagtcgcgagttgagtgcgcagctatttgcttaagctgttcggtgaccgcacagatcccggtttggtcaattgcgctgtttcccctggcttattactgtgcggcagcgctccagggagcgcgcaataataacgacggcccaaggtcgtcagcccgccatcggtgtggaaataaaaacaatgaatcagccctctgtcggtacccctttggacgtgcagtccttcatcaacacccagccactgtcacgctatcagtggcgcgtggtgattttgtgtttcctgattgttttcctcgatggcctcgacaccgccgccatgggttttattgcgccggcgctgtcccaggattggggcatcgaccgcgccagcctcggcccggtgatgagcgccgcgttgatcggcatggtcttcggcgcactcggctccggcccgctggcggatcgctttggtcgcaaagtggtgctggtgggcgcggtgctggtgtttggcgcgttcagcctggcgtcggcctacagcagcaacgtcgatcaactgctggtgctgcgcttcctgaccgggctcggcctgggcgccggcatgccgaatgccaccacgctgctgtccgaatacacccctgagcgccacaagtcgttgctggtgaccagcatgttctgcggcttcaacctgggcatggccggcggcgggtttatctcggccaagctgatccctgcatttggctggcacagcctgctgctgatcggcggcatcctgccgttgatcctggcgctggtgttgctggtgtggctaccggaatcggcacgctacctggtggtgcgcaatcggggcaccgacaaggtgcgcaaaaccctgtcgcccattgagccgaacatcgtcgcccaggccagcagcttcagcgtgcccgagcaaaaaaccgtgaaggcgcgcaacgtgtttgcggtgatcttctccggcacctatagcgctggcacgttgttgctgtggctgacctacttcatgggcctagtgatcgtgtacctgctcaccagttggctgccgaccctgatgcgcgacagcggcgcgagcatggagcaggccgcgtttatcggcgcgttgttccagttcggtggcgtattgagcgcggtgggcgtgggctgggcgatggaccggttcaatccgcacaaggtcatcggcacgttctacctgctggccggggtgtttgcctacgcggtagggcagagcctgggcaatatcaccttactggcgaccctggtgctgattgccgggatgtgtgtcaacggtgcgcaatcggcgatgccgtccctggccgcacgtttctaccccactcaaggccgtgccacgggcgtgtcgtggatgctcggcatcggccgtttcggcgcgatcctcggcgcgtggatgggcgcgaccttgctgggcctgggctggaacttcgagcaagtgctcaccgcgttggtgatcccggccgcattggccaccactgccgtggtgatcaagggcatggtcagccatgccgacgccacctgacgcctgtgggaggggggcttgcccccgatggcagtggttcagccaacacatctcgtggctgatacaccgctatcgggggcaagccccctcccacattgattgagcgttgtctgaatgattagtgaggtaacaatctgttcgataatcgaacgttgagtcgattatcggattgtttggcccatttccccggcttaatcttcaagcacttcggcgccacctcagcgcctttttcgatccacaccgggagcccgaaccccatggctgaaatcctcgcgctgcgtgacgcggtgaagcaatttgtgaacgacggcgacaccgtcgccctcgaaggcttcacccatctgatccctacggcagcgggtcatgaaatcattcgtcagggcaagaaagacctgacgctggtgcgtatgacgcctgacctgatctacgaccagttgatcggtgccggctgcgcccgcaagctgattttctcctggggcggcaaccccggcgtgggctccctgcatcgcctgcgtgacgcggtcgagaagcaatggccgcaaccgctggaaattgaagagcacagccacgccgacctggccaatgcctacgtcgccggcgcatcgggcctgccgttcgcggtgctgcgtgcctacgccggttccgacctgcccaaggtcaacccgctgatcaagaccgtgacctgcccattcaccggcgaagtgctggcggcggtgccgtcggtgcgtccggacgtcaccgtgatccacgcgcaaaaagccgaccgcaagggcaacgtgttgctgtggggcatcctcggtgtgcagaaggaggcggcactggcggccaagcgctgcatcgtcaccgtcgaagaaatcgtcgatgacctgaatgcgccgatgaacagctgcgtcttgccgacctgggccctgacggcggtgtgccatgtgcccggtggtgcgcacccgtcctacgctcatggttacaacgagcgcgataaccgcttctaccaggcgtgggacccgattgcccgcgaccgtgggacctttaccgcctggatcaacgaatacatccacggcaccgccgacttcaccgaattccaggccaagctggccaccgcgcaggaggccaagtaatggcttactcgaccaatgaaatgatgaccgtcgccgccgcgcgccgcctcaagaacggctccgtgtgctttgttggtatcggcttgccgtccaaggcggccaacctggcacgcctgacgtcgtcgccggatgtggtgctgatctacgagtccggcccgattggcgccaagccatcggtactgccactgtccatcggtgacggcgaactggcggaaaccgctgataccgtggtgccgaccggcgagatcttccgctactggctgcagggcgggcgcatcgacgtgggcttcctcggcgcggcccaggtcgaccgcttcggcaacatcaacaccaccgtggtgggtgactaccaccagcccaaagtgcgcctgccgggcgcaggtggcgcgccggagatcgccggttccgccaagagcgtgctgatcatcctcaagcagtcggcgcgttcgtttgtcgacaagctggacttcatcacctcggtcggccacggcgaaggcggcgactcgcgtaagcgcctgggcctgccgggcgcggggccggtagggattattaccgacctgtgcatcatggaaccggaagcggatacgaacgaattcgtggtcaccgcgctgcacccgggcgtgacccgtgagcaagtggtggccgccaccggttgggcgattcggtttgccgagcaggtcgacaccaccgccgaacccactgaagttgagctgaccgccctgcgtgaccttgaagcacgcaccgcagccgcccatggccaagcaccgggagaagcctgatgcgcgatgtatatatctgtgacgccattcgtacccccatcggccgttttggcggtggcctgtccaccgtgcgggcggatgatctggcggcgctgccgatcaaggcattgatcgaacgcaacccgtcggtggattggacggcagtcgacgaggtgttcctcggctgcgccaaccaggccggtgaagacaaccgcaatgtggcgcgcatggcgctgttgctggcgggcttgccggaaagcattccgggggtgaccctcaaccgcttgtgcgcctcgggcatggacgcgattggcaccgctttccgtgcgattgccagcggcgaaatggagctggcgattgccggcggcgtcgagtcgatgtcccgcgcgccgttcgtaatgggcaaggccgacgcggcgttttcgcgcaacatgaagctggaagacaccaccatcggctggcgttttatcaacccgttgatgaaagagcagtacggcgtggacgcgatgccacagaccgccgataacgtcgccgacgattatcacgtgtcccgtgccgaccaggatgcctttgccctgcgcagccagcaacgcactgccgccgcgcaagccgccggtttcttcgctgaagaaatcgtgccggtgcgggtcgcccataaaaaaggcgaaaccgtggtagagcaggacgagcatccccgcgacaccaccctggaagccctggccaaactcaagccagtcaatggccccgacaagaccgtcaccgccggcaatgcgtcgggtgtgaacgacggtgcggcggcgctgatcctggcctccgccgaagccgtcaagaaacatggcctgaccgcccgcgctcgcgtattgggcatggccagtgccggtgttgcgccacgcgtcatgggcatcggcccggtgccggccgtgcgcaaactggtcgagcgtcttggcttggcggtcactgactttgacgtcatcgaactcaatgaagccttcgccagccaaggcctggcggtgttgcgcgagctgggcatttccgacgacgcacctcaggtcaacccgaacggtggcgccatcgccctcggccatccgctgggcatgagcggcgcacggctggtgctgactgcgctgcatcagctggaaaaaaccggcggccgcaaaggcctggcgaccatgtgtgtcggtgttggccaaggcttggccctggcgattgaacgcatctaacaagagaggattgctccatgagtgacaagcccggataccggcgcccgcaagcgggcactcaaccggattacctgcacccggcctaccagtcgacgaacctgcgttcgccgtcgcagcctttggtgttcttgccccattccttgtcggaaatcaccggcccgactatcggtgccgagcgggtcaacgagaaggacaacgacctcaccgcccagcatgaaggcgagccccagggcgaacgcatcatcattcacggccgtgtgctggatgaaaacggtctaccggtgccgggcatcctcgtggaaatctggcaggccaacgccgccgggcgctacaaccacaagcgcgacctgcacgacgcaccgctggacccgaacttcaccggcaccggccgcaccgtcaccgacgccgacggctggtaccagttccagaccatcaagcccggcgcgtacccgtggggcaaccaccacaacgcgtggcgcccggcgcatatccacttttcgctgttcggcccgagcgtgctgacgcgcctggtcacgcagatgtacttccccggcgacccactgctggcgtacgacccgatctacaactgcgtaccggacacttcggccaaggaacgcttgatcgcccgtttcgacctggaaaagaccattccttcctatgccctcggctaccgctgggacatcgtcctgcgcggccgcgacgccacgccgatggagaaatgagatgacactcaacgcgaccacgtcccacaccgttgggccgtattaccacatcggcctaacctggctgaaccgcgaagacctcaccgtggccgccacccttggcgagcgcgtggcgatcagcgggcaggtggtggatggcaacggcgatgtcgtcaacgacgccatgctcgaagtctggcaggccaacgccgctggcaagtacgaccacccggaggatgagcaggacaaggccctggacccgaacttcgaagggttcggccgggtgccggtggatgccgaagggcggttccgctttaccaccatcaagccgggcgccgtgccgggcctgaagggcaccacccaggcgccgcacctggtggtactggtgtttgcccgtgggttggtgaagcacttgcttacgcggatttatttcgagggcgaggcgctgaatggggaggacccgttgctggcgtgtgtgccagcagagcgtcgcagtaccttgattgcgcaacaggatgcggcgggggtgtatcagtggaatgtgattctgcaggggaccgatagggaaacggtgttcttcgattattgagtggttttttagggccccatcgggggcaagccccctcccacatgttgaccgcaccgcctatcaaatgtgggagggggcttgcccccgatgaggtcggttcaggcaccacctacccaaaagtcttcttgcggaacatggttgttgcaaagtatgtctaggctataaccgttcccactgagtgaaaaaaacatgacaacaacaacgagtcactacaccggagaagaacgcagcaaacggatttttgcgattgtcggggcatcctccggcaacctcgtcgaatggttcgacttctacgtctatgccttctgcgccatttactttgccccggcgtttttcccgtcggacgaccccacggtgcaactgctcaacaccgctggcgtgttcgccgccggcttcctgatgcggcctatcggcggctggctgtttggccgggtggccgacaagcacgggcgcaagaactcgatgatgatctcggtgctgatgatgtgcgccggttccctggtcatcgctttcctgcccacctacaaggacatcggcgcctgggccccggcattgctgttggtggcgcgcctgttccagggcttgtcggtgggtggtgaatacggcaccaccgcgacctacatgagtgaagtcgcgctcaagggccagcgcggtttcttcgcctcgttccagtacgtgaccctgatcggtgggcaactgctggcggtgctggtggtggtgatcctgcaacagatccttaccgaagaagaactgcgcgcctggggctggcggatccccttcgtgatcggcgcgatcgcggcggtgatctccctgctgctgcggcgcaccctcaaggaaaccaccagcaaggaaatgcgccaggacaaggacgccggcagcgtggccgcattgttccgcaaccacaaggcggcgtttatcaccgtgctcggctacaccgctggcggctcgctgattttctacacctttaccacctacatgcagaagtacctggtgaacaccgccgggatgcacgccaagaccgccagttacatcatgactggcgcactgttcgtgtacatgtgcatgcagccgctgttcggcatgctctcggacaagatcggccgtcgtaactcgatgctctggttcggcgccctcggcaccctgtgcaccgtaccgatcctgctgaccctgaaaaccgtgaccagcccgttcctggcgttcgtgctgatctccctggccctggccatcgtcagcttctacacctccatcagcggcctggtgaaagcggaaatgttcccgcctcacgtccgcgccctgggtgtgggcctggcctatgcagtggccaatgcgatcttcggtggctcggcggaatacgtggccctgggcctcaagtccatgggcatggaaaacaccttctactggtacgtcaccggcatgatggcggtggccttcctgttcagcttgcgcctgccgaaacaggcggagtacttgcaccacgatctgtaagggatgagctatgacactgcgcacgagcaatcaattgttcgacgcttacttcacggcggacagcatggccgaggtgttctgcgataggggacgcttgcagggcatgctggatttcgaagcgggattggccagggcgcaggcccgggtcgggctgatccctgaggccgcggtcgcaccgattgcccaggcgtgcctggcctcgctgtacgacgtggatgccctcggcgtggcgattgccacggcggggaattcggcgattccgttggtgaaggcgctgggcaagttgattgccagtgaagatgtcggggctgagcgctatgtgcatttgggcgcgaccagccaggatgtgatggacaccggcctggtgttgcaactgcgccgggcgctggcgctgatcgaaaccgacctggcgcgcctgggggatattctggccgcccaggcccagcgttacgccgccgtgccgttggctggacgcacttggttgcaacacgcgacgccggtcaccctggggatgaaaatcgccggttggctgggggcggtgacgcgcagccggcaacggctggtggagctgaagccgcgcttgctggtgctgcaatttggcggtgcttccggaacgttggccgcgctcggcgagcaggccatgccggtggccgaagccttggcaaacgagttgcaactgaccctgcccgaacaaccctggcacacccagcgtgatcgtttggtggagtttgccagcgccctcggtttgatcgccggtagtctcggcaaactgggtcgcgacatcagcctgctgatgcagaccgaagcggcggaggtgttcgagccgtccgcaccgggcaagggtggttcgtccaccatgccgcacaagcgcaacccggtgggcgcggccgtgctgatcagcgcggcgacccgcgtgccgggcctggtatcgacgatgttcagcgccatgccccaggagcacgaacgcagcctgggcctgtggcatgcggaatgggaaaccctgccgcagatttgctgcttggtctccggcgcattgcaacaggcgctgctggtgagcgaagggttggaagtcgaccccgagcgcatgggcaaaaacctcgacctgacccagggtctggtgctggctgaagccgtcagcagcgtgctcgcccaacgcctgggccgggagactgcgcatcacctgctggaacactgctgcaaacgtgccgtcgcagaagggcgtcaactgcgtgcggtactggccgatgagccgcaagtcaccgccgagctgtcggcggccgaactggaccgcctgctcgacccggcccactacctgggccaggcccgcacctgggtcacccgcgccgtagccgaacactttgcttgaggagaccaccatggcatttgtacacctcgccgaaggcgacctgcattaccaactggacgggcctgtggatgcgcctgtgctggtgctgtccaactcactgggcaccgacctgcatatgtgggacatccagatcccggcgttcacccagcactttcgcgtgctgcgtttcgatacccgtggccatggcaaatccctggtcactcctgggccgtacagtatcgagcagctcggccgcgacgtgatcgcgctgctggatgcgctggatatccaacgcgcgcatttctgcggtttgtccatgggcggcctgatcggccaatggctggggatcaacgcgggcgagcgcctgaaccgcctggtggtatgcaacaccgctgccaagatcggcacgcccgaggtgtggaacccacgcatcgagatggtgttgcgagacggcgcagcggcgatggtggcgctgcgcgatgcgtcgatcgcacgctggttcacggcggacttcgcggccgctaacccgcatcaggccaagcagattaccgacatgcttgcggcgacctcgcctgaaggttacgccgccaattgcgcagcggtgcgcgatgcggattttcgtgagcaactggccctgatcaaggtgccgacgttagtgattgccggcaccgacgatgcggtcaccccaccggccggcagccactttatccagaaccatgtgcagggcgccgagtacgccgagttctatgcggcgcacctgtccaatgtgcaggcgggcgctgcgttcagcgactgtgtcattgaattcctgctggcccactgaggagctgtttgtgaacgagaaacaacgttacgccgaaggcctgcaagtgcgccgcgaagtgctgggcgatgcccatgtcgaccgaagcctcaatgccctgaccgagttcaacagcgaattccaggagatgatcacccgccatgcctggggtgacatctggactcgtccgggactgccgcggcacacccgcagcctgatcaccatcgccatgctgatcggcatgaaccgcagcgaagaactcaagctgcacctgcgtgccgccgccagcaacggcgtgacccgtgccgagatcaaggaagtgctgatgcagagcgcgatctactgcgggattccggcggcgaatgcgacgtttcacctggctgaatcggtgtgggatgagctgggggttgagtcccaagcgtaagcttgggacctgagacaaacgtgatatccggttggatttattcatcgctaatgtaatcgctagtgtatacgtaactttcccgctttggctcccccatctctttacgaaaagcattttcattgaaggggtccgggttggtattagtgagcggtgtttttggatcgttatcgtgatcaaagtcgggtttgttggtgggtaggccgacggcttgaagttcgacgttctgttcgccgaagttgtagccgggttgccttgtaccattcataccggtccaggcatgcgacagttcatgatataggaagttgtgaggtccaatgacacggttgggcttgaattcgatataggagcgattgtagcctacttcgcctcccctgtcgggtgtgccactttttccattttgaataaaaccaaaatctgatgtttctgcgtattcggattctctgccttcttctgtgagttttatctcgtttgggttgtgcccgtagtaatagctgttgtcccgggattcaacttcgaatatttttagtggcgcaccatttactgatgctttcgaatctagaaattgcagcattttttgacctgtacgcgaggatctcatcatttccaagtcatcttggacgcgctgcttaaattcaggcgagccttcaactttaattcctgtggctccgacgtgcaggtagttaatagggttgacaatattgtctgggtgtttttgtactgagtcgcttggcttcgcgtagatagaatcaaagcgattgtttgactctattttgtcattgcctgcacctgcatagaaggtagtcaaagatttaccttgtaataggtcgtcacctaagcctccgctcatcacggtgtgtccacgttcactaccataaagtttgtcatctccagggcctccatccatgtagaccatttgcgccttggctccgaatatacggtcgttacccttattgccgtatatataacttatgccccggcccgcacgtatggtatcgttgccgtcattgccttcaacataataagttccggaaccaagtcttattgtgtcattaccccctccgccaaagatgcgggagcgggccccgcgtgcagtgatgtcgtcatcaccgtctccgctttctataatgatttcatttgatacatctttgtcgactttgagggtgtcgtttcctccgtgagttcgaatagttattttttgattagcgtcacctatcgtgtaacggttaggctgtacagtgtagcgcttttcgttgactacgatgtcgagggtttcatctttgcctttgcgcacgcgaatagagtcggctttgttgccggtttctataataaggttgtcgaacgttagctggccgtgcttggagggggagttttttattgattttatggtttcttccctagtgacttttatattttcatcttgatacacaagggttggttgaatgatggttgtatataaaggttcttggtctgtggtgggacgaggtgttcctgctcgctcagtatgcgcacttgaactgttgcgttctccgctgataaatataggagtgtcagaatttttagtagactctgctaatttatatttttcagcgggtgagggcaggggtgggtaatttttaatcatcggttgaccattaaattaaaatgtgaggtacctcctgattggttttttttacgtaatagttccattttcagtttagcgagagtcagaatccccaatccaattgcaggcaggtcggttaggcacctccacttcggcgccagcaacggcgtgacccgcgccgagatcaaggaagtgctgatgcagcgcgcgatctactgcgggattccggcggcgaatgcgacgtttcacctggctgaatcggtgtgggatgagttgggggttgaattgcgcgaataggcgtcagtgggagtcggcatcccatacccaattccacacgcccggcagatgcaccggctcactcacgtccttcaccgtgcgcgccagtgccgcacgctgcagagctgccgtatcggtgtagaacggttcagcggcggtcttcatgccgttgatccgtgcactgtccagcaggatctgcaagtactcctgcatatgccgtgcggtgtagcgattgatgtcgtggaaggtcaccaccacagggatcaccccatccaccgtcggcaactcgcccaacgcaatgtgttcgcgcaccaccgacagttgccgatacaaattggcccggcgccgtgggctgccgttgaagccccagatcttgccgtcattggcactcaaatccgtgagcagcacctgcatgccgtgacgctggtaggcggcgaaggtgcggcggtcgtaattccagaacggcgggcggaccagtaccggcgggttgccggtgatcgccgcaatgtcagcggcaccctgggtgagggtgcgttccagttcggcgtcattcagccagcgatggttggtgtgaaacgccgtggcggtgtggaaggccaggatgtggcccgccgcatactcgcgctgcatggtcttgcggccccgtgaactgccaccggagcgcgaggcttcggtttgcaggaagaacaccgccttgatccccgacagcaccgggttttgcgccaggtcagccaccactgagcggctcggattgttgtagcccgacgcgctgggaccgtcgtcgaaggtcagcagaaagcggatcggcgcccggccttgcaggcgctgctcggtctgcggtgtcagggcaatgggcgcgccaatacagccgctgaggctcagggccagggcaagcacggcggaggcgatggcgaagggtttcatggtgggcgcgggctcgaataggaggccgctgttgggtggatcagcagcggcaggcgcgcacgatacagcaagatggttggtatgaggttaccgcctgaccaacgagcgcggttcaggctcaaccgacgtattaggtacgcagcagcttgcccatttcttcgttcaaggcattttcagtgaagggtttgggattggggggaaactcgggcgtggtcggcaaccctacggcttgacgttcgctgttggggacatcgaatgattcacccttgaacatctccacagtcgtgcctgccagcgcagtgccgttaccggcgtcataggcgtggaccatttcgtgatagagaacggtgataggtgagtatgtcacgccggccagtacttccaggactgagcagttataggagatttcagcccggtcagcccgcgaccccggcacgccgtcgaccatgaaaccccacttggggtcgccgccgaccaccggtgggcgttcgtattgcaacaaggctttgagttcctggctgccataggtgtagccgcttcctgtgtcgagcaggtcctccaccactgtcaccggtgcgccgggctatcgcgttcatttcggcaagtatctgtttgccctgaggggaactgcgcagcaaggccagatcgtcttcgacccgttggatgaagtcggccgaaccttttatgacaaacccttcaagcgacgcgtggtcaggcgtgacggtggttaatctcgagccgttgaggtgccggatcgtatcgccgggttgagcgtagatcaggtcgccggggcgattggcaaccactgcatcacgaccgctgccggtatagaacgtactgcggtcgttgccaatcaagcggtcattatcagcgccgccatgcagcacggtatggccattgaccttcacgtccaactggcctggcagggtctggctgatgtggacctggtccgctttgtcgccggtttcaaggatcaggctgttgctgaggctgttgtcaaagtcgtactcccagactgattgcccgccggccttcaaatttccatcatccagaaacggatgccgatgcgcttgaaccggattgtcgggcgtgaacgccagttgaggaggagtgtcgggtgtatagcggctgttgctgaagaccgtggcgcatgcaatacgatttgaagcgtccatgtgagatccctgtgggagagccaggcattggccctgtctcgtgaagtcgaccggacgcttcaaatcgttcccagggtaaatgttatgcggctttacagcaggctgatcgggtaactgacgatcaaccggttctcgtcgaactcgttgttgctgtagtcgcgacgcatgctggaattgcgccagcgcacggtcaggttcttcaggctgccgctctgcacggtgtagcccaattcgctttcgcggccccattccttgccgtcagtgatggtgccggtgtggacgttgctgccgctgatatagcggttcatcagggtcaggccgggcacgccgagggcggcgaagttgtagtcgtggcgcacttgccaggacttctcctgggcattgtcgtagctgctgttgtagctgtcgttggccagggtgccgccgctggtgccgttgacgcgcatccaggcgctgttgccggtgagtttttgcaggccgacgtagaaggtgttgccgccgtatttggcagagaacaggccagaccaggtcttgttatccagctcgccggcgcgggcgctgccatcgtccttgccatagaaaaagcccaggttggcgcccagggtccagtcgcccaacggctggctgtgggtcaggttgacgaactgctggctgtagatgtccttgagctgggcattccacaggccgatctgggtgtgtttgtcgttgaacaggtattcgccgccctggaagttgaagcggtccgaggtgaacgcggctttgccgaacatcgacatgtcgctcatgctgctgtcgtcacgcgggctgttggcgcggaactggccaccgtagagggtcaggccgtcgatctccttggaggtgatctgcccgccgcgcagggtttgcggcaaggagcggccatcgtccgaacgcaggatcggcagcaccggcatccattcgccaaccttcacttcggtcttggaaatacgcgccttgaacgccacgcccagacgcccgaactcatccgccgggcggccgtcgtggtccaacggcagtagttgggttcccccggtgccacgtccgccatcgagcttcaacgagtacagccccagcacatccacgccgaagcccaccgtgccctgggtaaagccggacttggcgtcgaggatgaaactctgcgtccactcctgcgcaccgccctgggtcttggtcgggttggtgaaattgcggttgaagaagaaattgcgcaggttgaggttggcgctggcgtcttccaggaagccgtgttcctcggcgagggcgggcagggcaagactggcgacagcggttgccagcaagagccggcgcgggtggaaagtgctcatggcgtaaggacctgttgttattgggtttatgcaggtggcggccatggtgcagggcggtgcgggggcgatgaaagtgggggagagccggttgtgggcgatgatcgaacgcaagttggccagtgaagaaaaacaaaaagcccaccaaaaggtgggcttcgttgacgcgggcgctatcagaacaacttcaacgccggtgcttcttctttcaacggctcattcttcgcggtctgctcgttccagccaccgccgagggccttgtacaggttgacctcgctggtgagctgcgccaggcggtcggtgatcagcgattgctgggcactgaacagttggcgctgggcatcgaggaacgtcaggttgctgtcgacaccgatgcggtagcgacgctcggccaggcggtagtaatcctggttggccgcgacgaagccacgctgggcgtccagttgctgcttgtaggtctcacgtgcggcaagaccgtcggagacttcctggaagccggtctggatcgccttctcgtagttggccacgttgatctctttctggatcttcgagtagtccaggctggcgcgcaggctaccggcgttgaagatcgggatgttgatctgcggggcgaacgaccaggtgcccgaaccgcctttgaacaggccgcccaggttagggctcgcggtaccggagctggcggtcaggctgatgctcgggaagaacgctgcgcgggccgcaccgatgttggcgttggcggccttgaggttgtactcggcttgcatgatgtcgggacgacgttgcagcaggtccgatggcaagccggccggcacttcgctgagcaggttatccgacagcggcttgctggcgatattcgccggcaggccggtgcccagcagcagggtcaggctgttttcgtcctgggccacctggcgggtgtaacgcgccagggcgacccgggcgttttccaccgaggtacgcgattggctcaggtcgagggccgaggccacaccgacttcgttgctgcgcgaggtgagcttgaagctttgctcgtacgcgtccagggtgtcctgggtcagcttgagcagttccttgtctgcctgccaggtcaggtaggcattggccacgctggccaccaggctgatctgggtactgcgccgcgcttcttcggtggcgaagtacttttgcagggcttcttcgctcaggctgcgtacgcgaccgaacaggtccagctcatacgagctgatcccgagaccggccgagtattggctgctgatggtcgattcgccggtctgcgacaagcgggccggggtacgcgaacggctgccgctgcccgtggccgacacggccgggaacagatcggcgcgctggatctggtactgcgcggcataggcgtcgatgttcagggccgctacacgcaggtcacggttgttcaccagcgcggtctggatcagctgttgcagggcagggtcatggaaaaactgcttccagccctgctcgacagcggcctggctcggcgcctgggccgacgaatacgccggcccctgcgggaactgtgcggccaccggcgcttcggggcgctgatagtcaggtatcagcgagcagccactaagcacgaatgcggtgacggctagggaaagtagcgacttgctcattggccagcctctttaggggtttcagttgtgtcagtctttttacgttcgccggcggcggatacggttgcgaagaacaggggcacccagaagatcgccagcacagtggccgtgatcataccgccgattacaccggtaccgattgcgtgctggctgcccgaacctgcacccgaggagatcgccagcggcagtacgccgaggatgaacgccatggaggtcatgatgatcgggcgcagacgcatccgcgaggcctcgatggccgactcgacaatgcccttgccttgttcgtgaagttctttggcgaactccacgatcaggatggcgtttttcgctgccaggcccaccgtcaccaacaggcccacctggaagaacacgtcgttggacaacccgcgcatgctggtggcgatcaacgcacccaccacacccagcggcactaccagcaccaccgcaatcgggatcgaccagctttcgtacagggccgcgaggcacaggaacaccaccagcagcgacagggcgtacagcgcaggcgcctgggagccggacaggcgttcttcgtacgacaggccggtccacgcgtagccgatacccgccggcagttgcttggcgatacgttcgacttcggccatggcgtcaccggtactgtagcccggagccggggtgccgaggatttccatcgccgctacaccgttgtaacgcgagagcttgggcgaaccgtagatccacttgcctgaggaaatggccgacattggcaccatcttcccggagtcgctgcgcacgtaccatttgtccaggtcttctggggacatccggccagcggcttcaccttgcacgtacaccttcttcacccgaccacggtcgatgaagtcgttgacgtagctgccacccagggcgatcgccagggtctggttgatgctcgacagcgaaataccctgggcactggccttctcgtcgtcgacggtgagctcgtactgcggctcatcgttcacgccgttggggcgcacacccgcgaggatcttgctttgcgcggcagccccgaggaactggttgcgtgcgtccatcagcttctggtggccaacgccgccctggtcttgcaggaacacgtcgaaaccggtggcgttacccagttccagtaccgaaggcggcacgatggcgaacaccatggcgtccttgaaggcaccgaagaagtaaccctgggcacgcttggccacttcgaataccgaggtggatgcatcacgttcatcccacggcttgagcatcacgaacgccaggcccgaactctggccacgaccggcgaagttgaagccgttaacggtaaataccgatttcaccgccttgccttcgcctggctcgccttccttgtcgttgagcaggaaggcacgcatgtcgtcgatgactttctgcgtacgttcggctgaagatccgaccggggtctgcacctgggcaaagattacgccctggtcttcttccggcaggaacgcgctcggaatgcgggtgaacagccagatcatgccggcgaagatgatcaggtacacgaagaatgcaggaaacttgtgcttgatcatattgcccacgccgcgctcgtagctcagtacgccacggtcgaaggtgcggttgaaccagccgaagaaaccacgcttgggttggccgtgtttctcagggtcgatcggcttgagcatggtggcgcacaaggccggggtgaagatcagggcaaccagtaccgacaacgccatggccgaaacgatggtaatggagaactgtttgtagatcacaccggtggagccgccgaagaatgccattggcaacagtaccgccgacagcaccagggcaataccgaccagtgcgccctggatctggcccatggacttgaccgtcgcctctttgggcgacaggtgttcctcggccattacccgctcgacgttttccaccaccacgatggcatcgtccaccagcaagccgatggccaggatcatgccgaacatggtcagggtgttgatggtgaagccgaacgcggccaggatcccgaaggtacccagcaataccaccggtacggtcatggtggtgatgatggtggcgcggaagttctgcaggaacaggaacatcaccaggaacaccagcacgatcgcttcgaccagggtgtggactacaccggagatcgattcggtcaccaccggcgtggtgtcatacggcaccacagccttcatgcctggcgggaagaacggttccagggacgccacggtggcacggatggccttggcggtgtccagggcgttggcgcccgacgcgagcttgatcgccatacccgacgccggcttgccgttgaactgtgcactgatgctgtagttctggccgcccagttcgatccgtgcgatgtcacgcaggcgaacctgcgagccgtcggtattgaccttcatcaggatcttgccgaactcttcggcggtctgcaggcgggtcttgccgatgatggttgcgttcagctgggtgccgggcagggcaggcaggccgcccaattggccggtggccacctggacgttctgtgccgcaatggcagtgctgacgtcgaccggggtcaactggtagttgttcagcttggccgggtcgagccagatacgcatggcgtactgcgaaccgaacacctggaagtcacctacacctgacgtccgcgagatcgggtcctggatattggacacgatgtagttggacaggtcgtccttggtcatgctgccgtcttccgacaccagaccgatcaccatcaggaagttcttcaccgatttggtcacgcggataccctgctgctgcacttcttgcggcagcagtggggtcgccaggttcagcttgttctgcacctgaacctgggcgatgtccgggttggtaccctggttgaacgtcgcggtgatggtcatgctgccgtcggagttactgtccgaggcgacataacgcaggttgtcgataccgttgagctgctgctcgatgacctgcaccacggtgtcctgcacggtttgtgcggacgcgcctgggtaggtcacctggatgtcgatggcggttggcgcgatggccgggtattggttgatgggcaacttcaggatcgacaatgccccgaccagcatgatcaccagggcaattacccaggcgaaaatgggacggtcgataaaaaatttcgacatgggttactccccctggccagcagcggcggcaggagcgggagcagaaccggcaggcttggcgttgtcggcgtccttgaccttgacttcgatgcccggcttgatgaattgcaggccttcggtgatcacgcggtcaccggcgtccaggcctttttccaccagccagtaggcgccggcagtgcggtttgccaccagttgacgctgctcgaccttgttgtccttgttcaccaccatggcggtcgggatacctttgatatcacgggtcacgccttgttgcggtgccaggatggccttgctgttcacgccggcttgcaactgggcgtgcacgaacatgcccggcagcaaggtgtggtcagggttggggaacacggcgcgcagggtcacggagccggtggtctggtcgaccgatacttcggagaactccagcttgccgtcctggccataggcagtgccgtcttccagggtcagcttgaccttggccgcgttggcgccggctttttccagctggccgctttccaggtcgcggcgcagtttcagcatttcggccgaagactgcgtgacgtcgacgtagatcgggtccagttgctggatgacggccatggcatcggcctggccgttgctgaccagtgcgccttcggtgaccgaagaacggccgatacgcccggagatcggcgcgaacactttggtgtagcgcacgttgatctgggcggtttgaacgtttgcttccgcggtcatgcggttggcgacggcggtgtcgtattcctgacggctgacggcctgctcatcgaccaactgcttgtagcggtcggagatggacttggtctgggtcaggctggcctgtgcgcttttcagggtggcgtcatacaccgacgggtcgatttggtagagctgttgcccttccttcacgtcgccaccttccttgaacaggcgcttgagaatgatgccgttgacctgtgggcgaacttccgcaatgcggtaggcggtggtgcggcctggcagctcggtcgtcagggtataggcttgcggttgaatggtgaccacgccgacctgaggggtttgggcgggcggagccgcttcttcctttttacatccgctgagcagcgatgccagggcgacggcagtgaccagagcggtaacagctggcttaagttgcatgaagatcctcgggtcaggcgcgcagggtgcgcacaagaagtgtggaagggtaaaaaacaagctgtgagtggataagtagcttgctacgcaatatacttacgttcatggttgtttgtaaactcttgacaggcttcgcggaatattgacaaagcaatgcccaaagtctcgattttagtacgttcggcgcccatgacggtgtcgtcccacaagtattcagacggtggtcaaccaccacccacagtgtcctgattgaggttttactgccatggttcgtcgcaccaaagaggaagctcaggaaacgcgcagccagattctccaagccgccgagcaagccttctatgagcgcggcgttgcgcggaccacgctggcggatatcgccgcgctggccggtgtgacgcggggtgctatctactggcatttcagcaataaatccgatttgctgcaggcgctgctcgacacgctgcatgagccactggacgagttggccagggccagtgaaagcgaggatgaactcgacccgctgggctgtatgcgcaagttgttgattcatttgttccatcaagtggccctggacccgaaaacccggcgcatcaacgagatcttgttccataagtgcgaattcaccgatgaaatgtgcgacatgcgccgccagcgccagacccacagcctggaatgcaacctgcgcatcggcctgacattgcgtaacgcggtccatcgcgggcaacttccggaaaacctcgacaccacccgtggcgcggtgtgcatccacgcctacatcaacgggctgatcggccagtggctactggtacccgacagcttccaactgcatcaggaagccgaacgttgggtggacgccgggctggacatgctgcgctggagcccaagcctgcgcaattaagacaaaatgcgtaattgcatcaggttgtgtcaacagtaaagcccaaggaccgtcaatcgtccttacgcctgattagtggggtgactttatatacgggctggcgggtggttgataggtagccgcctaagtattttgtagcgattttgttgcagggctgtgaaggaatgtttcctacaggacgctacaaatcaaaatgtgggagggggcttgcccccgatagcnnnnnnnnnnnnnnnnnnnnnnnnnnnnnnnnnnnngctatcgggggcaagccccctcccacattgggtagtcgtactacttcggaataacgattacagcgccagggtcgggtagtcgatatagccgaccgggcctttgccgtagaaggtttccggatgcgcttcgttcagcggcgcatcggctttcaaacgcgccggcaggtccgggttggcaatgaatggcacaccgaaggccaccgcatccgccttgcccgaggccagccatgcattggcgctgtccttggtgaagcgctcgttggcgatgtaggtgccgccgaaggctttcttcaattgtgggccaaggctgtccgcaccttctttctcacgggaacagatgaaggcgatgccacgcttgcccagttcactggcgacgtaggtaaaggtttccgccagattgtcatcgcccatgtcatgggagtcggcgcgcggtgccaggtgcacgcccacgcggccggcgccccagacttcgatggcggcgtcggtgacttccagcagcaggcgtgcacggttttccagcgagccgccgtactggtcggtgcgtttgttggtgctgctttgcaggaactggtcgagcaggtagccgttggcgccgtggatttccacgccgtcgaagccggcggccttggcgttctcggcaccggtgcggtaggcgtcgatgatatcggcgatctccgccgtttccagggcacgtggggtcgggtagtccgccagtggacgcaccaggctgacgtggcctttaggctggatcgcgctcggggccaccggggcttcgccgttcaggtacaactcatgggaaatacggcccacgtgccacagttgcaggaagatcttgccccccgcgccgtgcacggccttggtgacgttggcccagccgcgcacctggtcgttggaccagatgcccggggtgtccggatagcccacgcccatcggcgtcacggaagtggcttcgctgaggatgagcccggcggaagcgcgttgcacgtagtactcggccatcagcgcgttgggcacgcgaccttcatcggcacggcagcgggtcagcggcgccatgatgatgcggttcgacagttccaggtcgcccagtttgatcggatcgaaaatagtcgtcatgggataacacctttctctattaagtggttgatcagtgggtagcgagggccaggtcggcatcgccgccctgacggaaagtaatcagcgtcaccagcagcgcgagaatcgccagggccgctgcggccaagggcacgctggtcaggccgaaaccgtgggcgatcacactgccgccgacccaggcacccagggcgttgccgatgttgaaggcgccgatgttcagggtggacaccaggttcggtgcagccttgccgaaggtcaccacgttgatctgcaacgccggcacggcggcaaacgaggcggtggcccagaggaacagggtgatttccgtcgggatcaccgcgatgctggtccagctcagcgccgtggagaccaccgccatgctgatgaacacgccaaccagggtcgcggccaggcgcttgtccgccagcttgccgccgatgatgttgcccacggtgaggcccaggccgatcagcagcagggtccaggtcacgcccttgggcgacacgccggtgacatcgccgagcagcggcgcgacgtaggtaaagagggtgaacatggacgcggcgaacagcgcggtcatactcagcgacagccagatgccggcgcccttgagggcggccagttcggcgcgcatgtcgagtttttcttcatcacgcttggccggcagaaagcggatcaggccgatcagcgccactaccccaatcaccgtcaccgcccagaacgtcgagcgccagccagctgcctggcccagtgcggtgcccagcggtacgccgagcacgttggccagggtcaggccggtgaacatcagggccacggccgaagcacgcttgttggccggcaccaggttggccgccaccactgaaccgatcccaaagaacgcaccgtggcacagcgcggtgaccacacgggcaaacatcagcacgttgtagtcactggccagggcgcacaaaaggttgccgacaatgaagatccccatcaacgctaccagggccgccttgcgtggcagcctggcagtggccagtgccatgaacggcgcaccgatcgccacgcccagggcgtagccggtgaccagccagccggcgccgggaatcgacacccccaagtccgccgccacatcgggcagcaagcccatgatgacgaactcggtggtgccgatggcgaaggcgctgagggccagtatgagtagcgagaggggcattcgtggttccttgttacagcgctgcgctgtcgtgcgcgctgagttcggtggtgagcgccgcgaggaaggcttggatggtgtcctcgttgcgtttgaaaaagtgccactggccggccttctggctgctgatcaacccggcgcgttgcagggtggccaagtgggccgacacggtcgactgggacaagccgcagcgctggtcgatctgcccggcgcagatgccgtattcgtggttgtgcagttgctcggggaattgcacggtcggatctttcagccaggtgaggatgtctcgtcgtactgggtgtgccagggcttttattatttcgtcgaggtcgatggacatggcaggtgctcggtttcgtacagcgttatatcgcgatgaggcgaactttaaatcggtctatcccgatataccaatatgattttggtctgagcctaggctcattcggtatatcgggttataacgatacgttggcggcagtgatagactgcgcgccatgaattatctcgcacatctgcacctgggcggccaacttcctgagcaactgctgggcagcctgtatggcgacttcgtcaaaggccgcctgcagggccagttcagcccgcaaatcgaagcggcgatccagttgcatcgttcaatcgatcgcttcactgacagccatccgctggtaggtgaggcgttgtcgcgcttcagcctgacccgcaggcgctatgccgggatcgtcctcgatgtgtttttcgaccactgcctggcgcgggattgggcgctgtacgccgaccagccgctggagcgcttcacctcgcaggtgtaccgcgtcctggcggccgaaccgcaattgccggggcggctggcgcagattgcaccgtatatggcggcggatgattggctgggttcgtaccgtgaatttgcggtgatggagcaggtgttgcggggaatctcgcggcggctgacgcaacccgaggaactggggtatgccatgcacgagttgcgagagttgtacgagccgctgagtgaagatttccgacggttctaccccgatctgcaagcattcgcacagatccagctgacaaggtaaagctgaatgtgggagggggcttgcccccgatagcaatggttcagtcaaagcatgcagtgactgacacaccccaatcgggggcaagccccctcccacatttgaacggtgttcacttgagttcaggcagcgaatgctggtcgagcatccacttgctccgcttccggcaccgccccgaacaacgccttctgcaccgcctgctgcgcctgatacgccagcgccgcgcgttcctgtccggcacaggcaatcggcgtgagcacatggatttccacgtcaccctggtcattggcaaacaagcgcatcaggtgcgagagcaaatcatcatcgccaataaacggtgccagcgggtccacttgcccatcacgcagataacggatcgccaccggttgcagcgacacatccgcatcgatcgcactggccagcaagcgcccgtggaacgtacgcaggctgcgcccgtcggtggtggtgccttccgggaacatcagcagcgggtgctgttgctccagatgacgggtcatctgcttgcggatcaactggctgtcgcccgagccccggcggataaacaagctgccagccttggccgccaaccaacctgccaccggccaggtgcgcacttcggccttggacaggaatgacatcggcgccacggcgccgagcagcggtatatcggtccaggacacgtgattgctcacccacagcatcggctgcgtcggcaattcaccgtgcaccgtcacgcgaaagggcagggcgttggtcagccgcgccatgaaaaaccgcgaccaacgctggcgccgcaccatcgaattggcgatgcccaaacgctcgaacaccccaaacacactggccatgctcaagcccagcgccaccaccagcagcacccgggcaatgcgcccgtacacgcgcaggcggctcatcacattgcagccttgaagtggcgcgcgtaacgcgggcacagctcatcgcgcttgagcaggatgaacacgtcggccacctggaaatcttcatcccagcacggctcgccgcagatcttggcacccaggcgcatgtaggccttgagcaacggcggcatctcggcgatcacgttggacggcaagtccagcgccggcagcggttttttcggttcggcgcgcaggtgttcgttgcacaggtagcgctcgcgcaggcgctgcatgatcgcgtgggcctggatcccgccgtcgtgcatcgggatgctcgcgcagcccatcaggtagctgtagccaccctggttgagcacctcggccaactcgccccacaacaccgcgatagtgccgccgttgcggtaggccgggtcgacgcaggtgcggccgatctccaggatcgggccctgcaggtggagcaagccatgcaggctgaattcttcttcgctgtagaaccggcccagggtgctggcggcctggtggtccaacaaacgggtggtagctaccagtcgaccgctgttcaagtcccgcacaccgatgtggctgcagtgaacatcatagtcatccctgtccaggcccagttccgcgcctttcagcttggcgttgaactcgccgctgaacacgttgaaccgcagggcctgggcttcctgcaacgcctgcgcgccaaccaggcgttcggcttgcagacggcgttcattgccggtgtcgctgatgcgggcgatctgagtcatggcgaatctccgagtgccagccacctttcggccggtcgacttgtttgtccaaactcaggctatgtaggctcggtgtcatctccatgaagttatggtgacgcttggatgacaggccttgtgtagcaaatctgtcatcaccctcggctaggctcgcgggcacgaatgcccccttgagtctgcgtccatggtcagaggcttgttgtgtgttgccctgctgttcgtcaccgtcaccgcccatgccgacacctggcctgacaaggattgggccaagggcacaccgctcgaaggcccggctgtcgacgccctcaatgcctacgctttcccagcgcgtgacgacaccacccgcaaaggcatccgcaccgacgcgctgctggtgatccgcgatggcgtgatcatctatgaacgctacggcgctcccaccaccgccagcacgccgcacctcacctggtcggtcagcaaaagcctgatggccacggtgctcggcgtggcctatggcgaaaaccgcttcaaactcaccgaccccgtcgcgcgcttttacccgccgatgaaacagcaccccaaggtgaccatggctgacttgctgcactggtcctcgggcctggactggcaggaagactacgaatacgcgccgctgaaatcctcggtggtggcgatgctctacacccgaggccgtggcgatatggcggactttgccgctgacaccgacgcggcggctgagccgggccgggtgtttcggtactccagcggcgacaccaacatcctctctgccgccctcaaaggcatgctcggccacaaggcttatatgagttacccgtgggatgcgctgttcaagccgttgggtattcgcaacgccatctgggaaaccgacgccgacgaaaccttcgtcgcctcgtcctacgcctacctcaccgcccgcgacctggcgcgggtcggcctgctgatggcgcgtgacgggcgatggggcgatcagcagttgctgcctaaagactgggtcgccttcaaccgccagccgttcgacaaatacaaggtcggccaggacgaagcggcgccgggtggtcattggtggcttaacaaaggcgaaccgcgcccctggcccgacgcccccgccgacaccttcgccgccctcggccactggggccaggcgttgtacgtgatgcctgacgaacagttagtgatcgtgcgctacggcgatgatcgcgacggcagctatcgccataacgaactgctcaagcacgtgctggcggcggtgcaaccatgatccgccgtcggccgtttaccagcctgtttctgctgctgttgctcgccctgctggggtggatctggcacgagcgcgtcaacctgcaagccttccccgacatcatcgcggcgtacacggccaaggaatattgttcgtgccggtatgtggagaacaatccggcggcgtattgccgggggtatgtgaagcagtacgtgccgacgagtgcgttcagcgataacccggagcgcagtgaggtgacggcgagtgggctggggcgcacgcacacggcgcggtggctgggggatcggcaggggtgtcggttggtgccgtgaggcttgtattcaaacagatttcttgtgtcttaatcgcatgcgttgctcttccctaatctaatgggcagtagtttccgggagggaaggggggtgaagtactattgctttctgcctgatgagcctaactgttgaattaagttgcgttgttataggtgatattccaatgtcttctaaaagcctgttatttctgacagttgatggtgttgctcgctttgatgaagaataagcgcgttgttgtcatgatcggttaacttgagtaataggagggcgatgtcatgggtagtattgctattgttgtgactggaattagtagtgatgagagggctgccgcagttttgagacggcttaacaatttggctgttcgtggtcttgcttatgcaccctacgcggatttaatatggtgcgaaactgcaaagcctaacttggaggaagtgcgaggatttaagtttgttgataatcctgaatttgatagaggggttttggctaatatcactggctttttcatgtcggggaagcaatatactgcggattttatattgagtttgtaaagggtataaaaactcgtcggtgataaggtttgatgtcgaaaggtgggtgttaagtctttggtgtttactatgcgatccgcggggaagttgaatatttgtgaacgcaagtttgctcgtgagaaacgtataagcgacgcgtttaatcaggtgccgttgttgcttacgttcttcgcgaacaagcccatttccacattgggtttgcgccgttcgtgacatgcgcttaaggttcgttcaggtttttcgccccacgagtcttcaatgttcaacgcttccgtcatcaagcccgttgccttcgctctgttggccgccgccgctgtgcctgcccatgccgactggtacctggataacgagtcctcgcgcctctctttcgtcaccaccaagaacaccgagattgccgaggtgcagcgcttcctggtgctgcacggcaaagtcgacagcaaaggcgcggcgcaactggaagtggagctggagtcggtcaatagcggcatccctttgcgcgatgagcgcatgcgcaatcagctgttcgagatcaagacgttccccgacgcgctgatcaacgcgcagatcaacctgcagccgatcaatgatttggctcccggcgcacaattggagttgcgcctgccgttgtccgtgaccctgcacggcaaaacccaaacctacagcgccgagttgttggccacgcgattggacgaccgacgcttccaggtagtgaccctggaaccgctggtgatgcatgccgaggactttgacctggcgccgggtgtggcggcgttgcgcaaagcggcggggctcaagtcgatcagtctgtcggtgtcggtgggtgcggtgctgatctttacggcgcgctgacgtgagtggcgcggtgttcccgtggcgcagcgccaaccgtttcgagttgttgatcgacgggccgaattttttcccgcagatgctggtgggcattgcccgcgccgagcggcaagtcgagctggagttgtacctggtggaagccggcgcctgcgccgaagccatggtgcaggcgctggtgctggccgccgaacgcggtgtgcaggtgcgttgcctgttcgatgattacggcagcctggcgtttaccctcgggctgcgcaggcgcttgaccgatgccggtgtggaactgcgcttctacaatcgcctgcgctggcgccgctggatgcgcaacctgtaccgcgaccatcgcaaactgctgttgatcgaccaggacatcgcctttgtaggcggcaccggcgtgaccgatgaattctggacgccgggcaacgacagtgccgactggcacgaagtgatggtgcaaatcagcggccccctggtgctcgactggcaagccctgttcgaccgccaatggcacgccaacaacgcgcgccgcgcctggaaacccgccacccatttcggcttgccacgcttacccaggatgcccgccaccggaccgggcctgggtcgtgtggcctatgccgatgcccgccaacaccgggacattttgcaatcgttgatccgtgccttgaacagcagcaagacgcgtatctggttggcgactccgtacttcctgccgacctggggcgtgcgtcgtgctctgcgccgggcggcggggcggggtgtggaagtgcgtttgctgctcaccggcccgcgcaccgatcacccgtccgtgcgctatgccgggcatcgttattacccacgtttactgcgttcgggcgtgcagatttttgagtatcagccgtgtttcctgcacctgaagatggtgctggtggatgactgggtcagtgtgggctcgtgcaacttcgaccactggaacctgcgcttcaacctggatgccaacctggaggcgttggaccctgaattgacgcgggcggtggcgggcagtttcgagcgggattttgcccagagccaggcggtgagcctggaggcgtggaagtcgcggccgttgtggcggcgggtgaagcagcgggtgtgggggtggattgatcggttggtggtgaacctgctggatagacgcggctagccagttcactgggaggcaaatgtgggagggggctcgcccccgattgcagggtgtcagtcactgaaaatattgactgaaccaccgctatcgggggcaagccccctcccacatgtttacagcagttcgaaggtttgctgctgtacgtcctgggaatccaacccgatctgcacattgaactcgcctggctccgccgcgtacttgagctgggtgttgtagaacttcaagtcttcctcggtgatggtgaagtgcagggtgcgctcttcaccggccttgagcatgaccttctggaagttcttcagctccttgatcgggcggatcatcgaaccggccacgtcctggatgtacagctgcaccacggtttcgccatccaccttgccggtgtttttcagcgtcacgctggcgtccagcttgccggtcttgttcagggtggtggatgacagcgccatgtccgacaggccgaacgtggtgtagctcaagccatagccaaacgggaacagtgggccggtggtgtcatcgaaatactgcgaggtgtagttgcccggcttgcctggggtgaatggccggccaatggtcaggtggttgtagtaggtgggaatctgccccaccgaacgtgggaaggtgatcggcagcttgcccgacgggttgtagtcaccgaacagcacgtcggcgatggcgttgccaccttcggtgccggcgaaccaggtttccaggatggcgtcggcctgttggttctcttcaaggatcgacagcgggcgaccgttcatcagcaccaataccagcggcttgccggtggctttgagggccttgatcaggtcgcgctggctttgcgggatgttcaggtcggtgcggctggacgactcgtgggacatgccacgggattcgcccacggcggctaccaccacatcggcatccttggcagccttgacggcctcgtcgatcatcacctgggctgggcgggtgtcatccaccacttccggcgcatcgaagttgaggaagttcaggtagtcgaccaccgccttgtcgttggtgatgttggcgccacgggcatagatgatcttgcctttttcgccgatcaccgcgttcatgccgtcgagcagggtcaccgattgctcgggtttgccggcggcggcccagctacccatcatgtcgattggcgccttggccaacgggccgaccagggcgatggtcgcggattttttcagcggcagggtgttgtcctggtttttcagcaacaccaggctgcgacgtgcgatatcgcgcgcgtcgctgcgatgcaggcggctttcggcgtaggtgtcggccgggtcatcctcggccttgccgatgcgcaggtacgggtccttgaacaggcccatgtcgtacttggcgccgagcacttcgcgcacggcgttgtcgatgtcgctctgttcgatttcgccggacttgagcaggccgggcaattccttgccgtacagcgagtcgttcatgctcatgtcgatgccggccttgatcgccagcttggcggcttcacgcccgtccttggccacgccgtgcttgatcagctcgaagatcgcgccatggtcgctcacggccaggcccttgaagccccagtccttgcgcagcaggtcgttcatcagccaggtgttggcggtggcgggcacgccgttgatcgagttcagcgccaccatcacgccgccggaaccggccttgatcgccgcgtggtacggcggcaggtagtcctggtacatcttgaccgggctcatgtcgaccacgttgtagtcgcggccgccttccaccgcgccgtacagggcgaagtgcttgacgctggccatgatgctgtcggcattcgccgggctcacaccctggaaggccttgaccatcacttcggcaatgcgcgagaccaggtaggtgtcttcgccgaagccttcggaggtgcggccccagcgcgggtcgcgggagatgtcgaccatcggcgcgaaggtgatatcgaggctgtcggcagcggcttcctgagcggcgatgcgcccggagcggccgatggcctccatgtcccagctggaggccagggctaggctgatcgggaagatggtgcggtggccgtggattacgtcataggcgaagaacatcgggatcttcaagcggctgcgcatggccgcgtcctgcatcggacggttttccggacgggtgatggagttgaacgtgccaccgatgcggccggcggcgatttccttgcggatcagctcgcggggcatttcggggccgatgctgatcaggcgcaattggccgatcttctcatcgagggtcatctgcttgagcaggtcgctgacgaaggcgtccttgtccttgagcgcagcaggctttgtttctgcccagacggggtgggtggccagcgtggcaacaaggccgagcaaacacagcttcttcatgaatatcctttttcggctcactgcacagcgaaaatgcgctgttctgccaaaatgtggggaacgtatgttgttgttcgagtgttataccgacaaatgccgcacacttcggaactcttattagcggtgggcatctttttagctgattgattcgatgcaatccagtcgtggcaacggattatgccttaccggtgcccaattccatcaaggttcgccaggagaaacaccatgcaagcagcacaaggttatcgctggggcttgaaagccgcggttctgctattgatcggcacggtgctcagcggttgcggcatcaacaacatcccgaccctggacgaacaggccaaggctgcctggggccaggtgcagaaccagtaccagcgccgcgccgacctgatccccaacctggtggaagtggtcaagggctatgccgcccatgagcaggacaccctcaccgccgtgatcgaagcgcgggccaaggccacttcgatccaggtggacgccagcaccctcgacaacccggaaaaactcaagcagttccagcaagcccaggacggcttgagcggtgcactcagccgtttgatggtggtgtccgagcgttacccggacctgaaagccaaccagaacttcctggccctgcaatcccaacttgaaggcaccgaaaaccgtatcgccgtggcccgccgcgatttcatccaggcggtgcaggcctacaacaccgagatccgcaccttcccgggccgtctgtggcacagcgtgatgtacagcgacttgccggttcgcgccacgtttgaagccaccagtgccgatgccgataaagcgccgcaagtgaagttcaaataaggccgcgctgaggtgtcgatgcgtttattacggataggcctggcactgtggctgttggcctgcgtgggcgtggcccaggcggcgctgaccttcccggcgctgaccgggcgggtggtggacaacgcccagatgctcgacccggccacgcgccagcaactcactcagcagttgcaggtgctggaacagacctccggcgaccagatcgtggtggtcaccgtgcccgacctgcaaggcgtgccgattgaggacttcggttatcagttgggccgcgagtggggcatcggccagaagggcaaggacaacggcgcgctgttgatcgtcgcccgcgatgagcgcaaattgcgcatcgaagtcggctacggcctggaaggtgtgctcaccgatgcgcagtcgtgggtgatcatcaaccaggtgattgcacccaagttcaaggccggcaacttcagccagggcatcagcgacggcgtggcggcgatgattcaggtggtgggcggcgaaccgctggccgtgccggcccatgtggcggacgccaactttgccaaggataatcccgggttttccatcggtctgtttatcctgctgatcggcgtgttgtggctgtgcaatcgcttgggcctgccggtgggtgcgatcctgctggcgattctcagcagcagcggccgtggcggtggtggcgggggcggcggcggtggtttccgcggcggcgggggcggctttggcggtggcggggcttcaggcggctggtgatgataataatgagagagcaagcacaaccatggcattactgactgaacacgagcagcgccaggtcgcgcaagcgatcgcccgggtggaaaagaccaccgacgcggaactggtgaccgtgctggccgcccgcgccgatgactacgcctacatcccgctgttgtgggctagcctgatcgcgctggtagtgccgggtgtggtgcattacctgtcgggctacctgaccatgtacaccttgctgctggcgcaatgggcgaccttcattgtgctgtgcctggtgttccgcttgcccaaggtgacgacacggttgatcccgcgttcggtgcgccactggcgcgcgtccaacctggcgcgacgccagttcctggagcagaacctgcatcacaccctgggcagcaccggtgtgctgattttcgtcagcgaggccgagcggtatgtggagatcctggtggatgacggcatttccagtcgcctggatgacagcaactgggatgggatcgtcaaggcgtttacccagcaggtgaagcaggggcagacgttggcggggtttgtggcgtgtatcgaggcgtgcggtgagttgctcaaggtgcatgtgccggtcacccaaacccgtaacgaactgcccaatcgcctggtcgtactcgaataaaagactcaacactgggcaaaaaaatgtgggaggggcggtgttccatccaatgaccactgatcaaataaccccgtgctctgaatcactatcccccctaaaatgcccggcattccctgcccgaggcgtttttgttcatgtctgtcactgctcaaccggatcatcatgcccagttcatcgaactgctgagcgcaagcctcgcgcagagtgcctttatcaaactggtgctggccaaatacgtcggtaacgaggctgagttgcagcggctgatcatcaagccggtaacggtcaaggagcagccgtgcctgtccttcgtctatcgctacaagacccgcgatatcaccaagaacttcccggtggccgagggagtggcaacgattgccgagctactgccggcatcgttcaagaacgcccatctgctgtcgctgagcgacgaagcgcagctggaatacagcaagaagaacaaaagctcgttgttcaaaagcaagccgcagcaactgcgcgaggcgccatcggctgagcataaccgcgagaaaaaccgcttcctcgacctgagccggccgttcctcgctgacctgggcgtgaccgacgccaagcagacgctgatcccgtcgatgtcgcgcaagtggaaacagatcaacaagttcatcgaggtgttcagccatgcgctgacctcgtcaccgctgaagctggaccagccggtgcgcgtcgccgactttggctcgggcaagggctacctgacgttcgccatccacgactacctgcgtaacaccctcaaggccgagggcgaagtgaccggcgttgaattgcgcgaagacatggtgaccctgtgcaacgccgccgccgcccgcctggagcacccggggctggtgttcaaatgtggcgacgtgcgcagcgtggcgcccagcgaactggacgtgatgatcgccctgcatgcctgcgacgttgccacggactacgcgatccacaccggcatccgctccggcgcgtcgatcatcatgtgctcgccgtgctgccacaagcagatccgcctgcaaatccagagtccggtactgctcaagccgatgctgcaatacggcctgcacctgggccagcaggcggaaatggtcaccgacagtttgcgtgcgttgttcctcgaggcctgtggttatgagaccaaggtgttcgagttcatctcgttggagcacaccaacaagaacaagatgattctggccgtgaagcgcgcagagccgctggacaatgcgcagttgctggaaaaaatccaggagctgaaggcgttctaccacatcaccgaacactgcctggaaaccctgctgcgcgcggatggttacctggcctgatcggccaatgctacgggcgcaggctgcaccgccgtcttgcgccccagcatcaccgtcacgatcaccccgcacgcgaacacccaggtaatcggctcgatgtgttctccaaagaacaacgccgaaaacgcgatggtgaagaagatctgcaacagctggatctggctgacccgcgcaatcccgcccatggccaacccggcgtaccaggcaaagaaccccaggaactgcgagaacagcgacacatagccaaatgcccaccatgcgcgcatcgaaatcgcgccttgatgttgtgccgccaggtaccacaccgggccgatcagcaccggtgtcgacagcaccagcgcccagcagatcacctgccagccgcccatctccttggccaatcgtccgccttcggcataccccaggccgcccaccgcaattgcaccgagcatcagcaaatcaccggcctggatactgccggcgccggtgatcaaggcgtaactcaacaccaggccactgcccagtgccgcgcaggcccagaaggctttcgatggccgctcatgggacaaccacgccgcatacagcgccacgcacagcggttgcaggccgttgaccaatgcgccgtgggatgccggcaaggtctgcatggcccaggccgacagcaccgggaaaccgagaatcacccccgcgatcaccaggcacaacccacgcacctggcgccagttgggccagcgttcgcgacgccacagcaacagcgccgccgccgggatcgccgcaaacagtgcgcggcccaggccgttgagcaacgggtggatttcctgcaccacgatgcgggtgaagggcagggtcaggctgaagatgatgacgcccagcaggccgagggccatgccggtgttttcgcgcgagctcatggggcaaccaaaacgagagggcttcaagggaagcccatctagccacatcccccgtcggttgcgggcctacagctgggtgcggatttatccgtacagtttttcagaagaagcgcgtgatgctgatcttggcgttgcggccttggctgtagacaccttcaccgctgagtgccggttggtagaagcggttgaacaggttatcgacggtgaagttgatctcggtgcccttgagaccggcctgctgcggtttccaattggcgaacaggccttgtgtgtcgtagctggcgttctccgtctggtcgtagataaagtcgccgatgctggagttcaaaccgcccgcgtaaatatcggtgggcacgcgatcggtcttgcgtacgaactggccctgccagcccacctgcgcgtcccaactcgggatcttggtacccagcaccaccacccatttggccggtgggatgtcccgcgcccacacgtgcaggttggtcgcccaggggttggtgtaggggttgtcgcgcttgcctgtggcccaggagtaagtcagggagccgaacaggtaggtcgagtcgtagtagctttccagctcgacgcccttgatggtcatgccgcccacattgcgatagttggtcctggacgccgcgtcactgcataccgcatcgatactgccggatactgtcagttgccgttcgcagccgacgccggtggctttcatgatctcgtcttcaatacggttgtggaacagcgtggtgcgcagttgcaggttgtcctcgtgggtgaagagccccgagaagttagtgacgttgcctgcggtaatcgccgtaatgcgctccgggtcgaggttcaggctggtggcgctgcgggtgctgagggcgccttggacttcgtactgttcatcgatcactggcgcgcgccaggtgcggttccaactggcgaagaaggccacatccggggttacgttccagaacgcggcgaggcgtggcgaccagccggtgtaggtgcggtcgctgtagtcgtgacccactttcgggtccgggttgctgtagtacggcgcatcgttggcttcgccgcgattgcgcacatggtcgtagcgcagggacggcgtgagggtcacgtcgcccagggtaatcgcgtcctggatgtagaacgcgttgctatcgaccttgccgtggggcatgaaatacggctggaaatgcccatagttgtatctggcagtgttgtaggtcgcacctggcatccagctttcggtttcgcgcttgtgcttgcggatctgtacgcccgtggtcaccgcgtgttccaacgggccggtggtcagcaggctggtattgcgcagttcgaggatgcggtctttgtaggacgtatccatcttgcgtccaccggtcgccaggctaatgacggcattcgcggcgcgctcatcggtctggtcggtattggactccgagtagctcagcttcaggtcgatcagcgggttgttcaacgggtggtactcgtacttgctcgaccaggtggtgtccaccgtttcgcggtcggccagaaagcgtgatacggccgtggcgtagccgtagcggtcgatggccgattgtgtcggcggtgatgggtaggactttgccgagaacggcgtcatacgctggctttgggcgcgtgagtaagacaggcccatgctgtgttcgtcggtgaagtacgcgttgaacttgaacagttggccttcgacatcctgcgcgctgttgggcaagcgtttggggttgatcgggtattcattgcgcgggtcgggaggtgtgccggcgagcttgaggtcgccgccgtcgcgcttggtcaggtaggccaggccatccatgcggccgtcgtcggtgcggccatacaccgcgccggtgtagacctgctcgtggttgttgctggcgtagccgtatttgaccatcgccccggcattttgcccgtccttgagcaggtcgggtgcgtccttggtgaccatgttgaccgtgccgccaaaaccgccgttaccggtaaatggcgagtaagggcctttctccacctcaatgcttttgatcaactcgggctcaatgaagatagtgccttgttgataacgctcgaaaccgcttttggccgcgccatccacggtcatcggcacatcttcggcatcgcccatgccgcgaatgttcatggtctggccgcccggcttgggcgagccacccatggataccccgggcagggtctgcaacagcgaaggaatgttatcgggctggtaacggtcgatatccgcctggctcagggtagagcggcccacggtgctggagtcgacctggctaccggtgccgatcacgctcagtgcatccagttgaacaacgccgctattggtggtcttggcctcttcgggccttaccacataggtactgccgaccttgatcagggtgaactcgccgtttttcagcagggtacgaatcgccgcttccggcgtgaagtcgccgttgagcgcgggcgcctgcacgttcttgagcaactcttcatcgaacagcaactggatctgtgcctgctgcgccacctggctcagggacgtggccagcgactgggccggcagcgtgaagggctcggcctgggcgctgaggctgtacgccaggcaggtggcgatcagggtcggtcgaagaaacaggtgcgaagcgtggcaaggcgcgcgaaacatgaaatcccccggtgtggccaagtggccgaaaaggtgtgcgtatcgaactcagaccggaggaagacggggcagctgaaaaaatccacacctgcgaatgcaaaatattctcaaataagaatcttgtgagtttatttgctcggttcgatcctcacgatgccgtcggtcgacatcacggttttcaccggcagcaaggcgggcaaggcgttgagcagggcgtccggatcattcacatccagattgcccgagaccttcaggtgcgccacggcgctgctgacctgcagcggcgcctgggggcgatacaggctcaattcatcgatcaggctggccagctcgcggttgcgaaatgacaggtgaccgctgcgccagtcggcgacctcttcggcggtgagggtctgctgctgcaccgtgcccttggcgtagctgtagatcgcacgttgccgggcgcccagcagggtgatggggcttttcgcgtccggctcgaaggcgacttggccatgggcgacgctgaccaccagttgctgctggctgcggcgcacatcgaagccagtgccgaccacgcgcacattggcctcgccggcttgtacgaacagcggccgttccttgtcggcggccacttcaatgtacagctggcccttgtccaggtgcaggatgcgctggtgcgcggtgaaatccacgcgtacgcgggtgttggcattcacatacaaagtgctgccatcgggcaggttgagggtgcgcatgcctttggcatgggccgcgacctgggtgtgatacagctcgcggggcgcgccgatatgggtggccaagaccgcgcacagcagagcagcggccacggccagggcagggcgccataccgacggtttgcgctggggcagcgccacgggtttgttcagttgttgcaactgggccaggtctgcccacagctgttcgaattcggcgtaggcacgggcatgggcgggatcggcctgccaggcggcaaaggccttgcgctcggcacgcccggtttcgctgcggttgcgcgcaaaccagctggcggcttgggcatcgatggcgtcgctgtcttcgatgtccagcacgtcggtgtcgctcaggcggttcattctggctgctccgtgccgggttcgtgttgaaggcgtcgcttgcaatgcagcagggcaaacgcgatgtgcttttccaccatgctggtcgaaatgcccatgcgctcggcgatctgcgcctggctcaggccttcgaagcggtgcagcataagggcttctcgcctgcggggcgagagttcggcgaggacttctttcaactgttccaggcgttgcaagcgttgcgcggcggccatgggatcgttttgctcgtcggtgacaggctccgcgtccatttcggcctgatcagagtggactgtgtgccgtaccttctgtttgcgccagtgatcacgcagcaggttgcgcgccatctggaacagaaacgcccgtggctgctcgaccttggcccggtcgcggtagtccagccactgagtgaagacatcctgggtcatgtccgccgcgtcgctggcgttgtccgtgcgtttgcgcaggaaatacaggatatctgtataaaacccgcgaaaggcatcggccgacaacgggtcgggcttgggacgagacatggatatccttcttgacgaagcacgacgtggaaaagtcgtgaatgatatcgagaactattgtcatttgtcattcggttaaatgacagccactgagtccatggcttgtaatcagccgggtgtgacctttaatcctacaagcaagtgaacaaaatcccacttgataaggagagagtcatggctggatggtatgagttgagtaaaagcagcaacgggcaattccgttttgtgttgaaggcggcgaacgcagaaaccattttgaccagcgagctttacgtcacccgcagcgcagccgaaaacggtattgcttccgtgcagaccaacagcccgcatgacgagcgctatgagaaaaaagtggccagcaatggccagccgttttttaacctcaaggctgccaatcaccaggtgatcggcagcagcgagcagtattcctcgacagcggcacgggacaacggcattgcaagcgtaaaggccaatggcccgacgaccacgatcaaagacaagacttgaaggtgtcgcaaaaaaacaaacaccccggctcgcaagaaccggggcgttttttcaggcggcgtccagcagcgccttcaattgattgcgtgccgtttcactcaatgggaacaccggcaaccgtgggtcacccacttccaaaccggtcaaccgcaacccggccttgattgtcgccggcaacccgcccttgaggatgaactccagcaatggcagctggcggtaaaacagcgcctgggcctgggtcagatcgttgctcaataccgcgtcgtacaaatccaggttgagctgtgggatcaggttcggcgccgccgtgcaccaacctttggcacccgccacgaaagcttccagtgccagcgggttgcagccgttgtagaacggcacgtcgctgtgacgatgcaactggtgcatgcgctggatatccccggtgctctccttgaccatggtcacgttggccacctgcttgatgatgcgcaggatcagctccaccgacatgtccgtgccgctggtggccgggttgttgtagagcatgatcggcacgccgatgctgtcgccgattgcggcatagtgggcgaggatttccgcttcgctgagcttccagtaagacgtcggcagcaccatcaccgcatcggcgccattggcctcggcgtagcgcgcgcggcgcacggccttggcagtggtcaggtcggaaacgctgacgatggttggtacgcgccgggcaatcttggccaggctgaaggcgctgacttcatcccactcggcatcgctcaagtaggcgccttcgccggtgctgcctaacggcgcgatggcgtgtacgccgctggcgatcaggcggtcgatggagcggcccaaagcgtcgaggtcgatgcgttggccgtcggcgctgaacggggtgatggtgtagccgatgatgccgtggatggttgggctggacatggaaagtctccggtcgaaaaagggcaggtcagttcaggcaatcggcgtgttggcgcaggttctgccgggcgtagtagttgaacgcggcgccgtggcgcttgggccgggagatccagtcatgggcctcgcgacccagctctggcaggatcggcttgatggtgccggccgccatcgccagcaactgcaacttggccgcgcgttcgatcaattgcgcgatcacgcaggcttcctcgatgctcgccccggtggacaactggccgtggtgcgaaagcaggatcgcgcgtttgtcgcccaaagccgtggtgatgatttcgccttcttcgttgcccaccggcacacccggccaggcctccaggaacgcgcagtcttcgtacagcgggcagaggtccatatgggacacctgcagcggcacttccagcatcgacagcgcggcgatgtgcgtggggtgcgtgtggatgatgcaattcacatccggccgcccacggtacacccagctgtgaaaacggttggccgggttgggaatgccgtgaccttccagcacctcaagatcttcgttcaccagcaacaggttgctggcggtgatctcatcaaaccccaggcccagttgctgggtgtaataggtgccctgttccggcccgcgcgcggtgatctgcccggccaagccggagtcatggccgttctcgaacaggatgcgacacgtgagcgccagcttttgccggtcggtccacgtattatccgcgagggtgttttgcatctggatcagcgcttgcttgaccagttggtctttcgggagtgctaatgtcttggccatatcggtgtcctttgggtggttcaatggacgtcggatttgctgtctcccgctgctcgcaaggtcgttgggtgaaggcaaatgacactaaagatgctatatgacaccttgtgtcattggcaagcacagctcatcgcttactgcatggattaaccgcagcgcatgtctatccgtttgaaattattgagaaaaaaacttggcgtcaccctggaggccctggccgaaaagtccgggatgaccaagagttatctgtccaaggtcgagcgcgggctcaacacgccatcgattgccgccgcgctgaaactggccaaggcattgaacgtcaaggtcgaggaactgttcagcgaagacagcgtcagcctggacagctacagcctggtgcgcagccatgagcggcccgacacctcgcccggttatgcggtgctggcccatcaggtcagtgaacgcagcctgctgccgttcatcatctacccgccggcggagttcaccgacaagaccttcaaggagcatctgggcgaagagtttctgttcgtgcatgaaggccaggtggaggtggacttcatgagtgaacgggtgatcctggagcggggcgatgcattgcacttcaatgcgcagaagccccatcggttgcgttcggtggggccggtgcaggcgcagctattggtggtggtgcacagcggcgaagagtgatcagcgttcgacaggaactgacagcgccggattacccaatggatgggtacgcgccgtaaagaacttcagcgccactccagccccgtcgaacaattgcgaataccgccgcttctgctgacgaataaacccatcgctgcgccccgacaccgagattgccagggttgtcacatcggcctggcgaatcgcatccaccaagtgctgatcctgctcccccagctcgtggccaaagatgcacagcgcgccctggtggttcagcagttgctcataacagaacgacaggtaatccgagctgcggatggtcttgagcttctcttgcaccttgccctcgctgacgaacagcggcacatcgtccagggtcttgatggtgttgttgatcgcaaaactgctgagcaaggtgctgtcggtggtcggcagtttgcgcgcggtgccgtcgaggttacgcaccaggtgcaggccgccgtgcaggtacaaaatacgcgtggcgtcggtacgggtgttgcgcaggtcgaagctggcgtcggcgctgcggaacaagtcgtcgatgcccggcgcgtgcagggtcgcccagtagttgagcaagtcgtagttgctggtgaacaccgtcgcgtagtgctgcaactccgtgttgagggtcgccagcgtcgacggttgcaccaggcgccaggggatatgcacggcgtggatggtattgatcaacgcttccttgatcgcgtaatagcggttgcgcggtgccgccgaactgacggccagggccttgttgacccggctggtggtcttcaacgcgcccagggcctgctcgaagctgcgggtttgcagggcatcgaacacgctgagttcggattggccgaggggtttttcttcgacggtgcgagcgttttcgaacagcgagtcgtaggcaaagtcttcccaaatcgtgcggctggcgccgttgccgatcagaatcccgctgaagtcgaggctcgcgcgcagtgcgctccagtcttcaaggtgggcgtctatatcctggaaatccttcatcggggcgggtctactcgaaatcggctggacggtgactttatcacgagcgagcgttgatcctgatcaagatgcagaacgcgtcatcggttgattctgtaggcataaagcctctgaggattgaccatgagcagcaccttcttcatccccgccgtcaacatcatgggcaccgactgcctcgacgaagccatgatcgccatccgcaactatggttttcgcaaggcgttgatcgtcaccgatgccggtctggccaaggccggcgtagccagcatgatcgccgagaaactggcgatgcaggacatcgattcggtgatctacgacggcgccaagcccaaccccaatgtggacaacgtcgagaaaggcctggcgctgttgcagcagagcgcctgcgatttcgtggtgtccctgggcggcggctcgccccacgactgcgccaagggtattgcgctgtgcgccaccaacggcgggcatatcggcgactacgaaggcgtcgaccaatcgagcaaaccgcaactgccgctggtggccatcaacaccaccgccggcaccgccagcgagatgacccgcttctgcatcatcaccgacgaaagccgccacgtgaaaatggccattgtcgaccgcaacgtcacgccgctgctgtcggtcaacgacccggcgctgatggtcggcatgcccaagggcctcaccgccgccaccggcatggacgcgttgacccacgccatcgaagcctacgtgtccaccgccgccacaccgatcaccgacgcctgtgcgatcaaggccatcgaactgatcagcgccaacctgcgcctggccgttcgcgacggcactgacaaggccgcacgggaaaacatggcctacgcgcagttcctcgccggcatggcgttcaacaatgcatccctgggtttcgtacatgccatggcccaccaactgggcggtttctacgacctgccccacggcgtgtgcaacgcggtgttgttgccccacgtacaaagcttcaacgccagcgtcagcgccaaacgcctgagcgacgtaggccgagcgttgggtgcggacatcaagggcatcaccgatgaagagggcgctcaggccgccatcgccgcgattcgcagcctggcccacgacgtcgaaatcccggcggggttgcgcgaactcggcgccaaactgcaggacattccactgctggcgagcaacgcgttgaaggatgcatgcggcctcaccaacccacgccgcgcggaccagcggcagatcgaggagatctttcgcagcgcgttttaatccatccgacaacgggcgacgcatatcgatgcggcgcccgccaacaccacacataaaaccgccaacggccaggcctgttgactcaccagcaggctcgccacgccgccgatcaacgcggccatcaactgatgcatgaagccgctcaacgccatggcgtaggagccgctcaccggtgaggcatcgttggccagggacaaactgatcgggtaactcatcgcttgccccagcaccgccacgcagtaaggcagccacagcaagacagcgattccgccagcaaacacactgctcagcaacatcacagccgttcccgttagaaccagggtcatgccccaacccatcattttcagccgccccgtgcgagcgacgaagcgattgaccattaatgcccccgccagatacgccacgctgattggccaacccagccagccatattgcgccgcgctccactcgaaacgcccttgcagaatcaacggtgcacaggtgttgaaggcgatgatcaccccataacccaggccaccgaccaacgccgcgtgcagaaacggcggatgctgcatgatcatggcgtagatacgccaggcagatgccgatgtatcgacctttacccgtgcagggaacatcacccggttcaacaccagcatcaaaccgactgcgccaatcgccaatccgtagaagatcgcctcccagccgaagaccacctgcaacaacgacccaacgaattgaccgatgcccaaagcaatcacgaaagtcatgcccagccatgtcaacgcttttgccagcaatgcaccgctgaagctgtcacgcaccaacacccgcgccatcaccgaaacaccgcctgcccccaacccttgaaccagccgcaacgccaagaagacttcaacgctgaacgccgagggaatcgccgcactcgctagcgcatacacgcagagcgccgccaacagcaccggcttacgcccaaagcgttcgcccaggctgccccacagcaacatcggcaatgccatgccgaccaagtagatcgccagcgccagcgcgacgtggtcttctgcggcggggagtgcatgtgcaatcgtggggacggcgggcaggtagctgctgatgccgagttgggcgaggaaggcggcactgcaggctatgacaagggtggtggtatttttcaagacgaggaaaccgccagcgtgagttctgaacaaatcgtcggaagtcgggttatatgaatcgtgccgtttgaaactcttcatttttgaagcgtgtgtaattcagcgagcacgtttattttcttctatcagactcaggagccttgagcaaaataaacgtattgtttcatgggtcatatctgctcgaagcgttatacgaattgcggcccttcctctgggaacaacagggaaaaatacagctgacgtgaagaagccactgtcggcgagttgtgctgcgattgtgttcgcttgttgcgcctcgccgcaggccacgagacggattgcagtactcgtgccgtactgcgcagtttcaataagtctgtcaaataattggatgttggcgaggagtttatcttgaagaagagtcagttccttcgtttggtgaatttttacagaggcaaagccagcgccaatagcggcagaatttagactctgggaccagttgctgggtccaccgtatcgatgcatgagacttttttgtttttcggtaccaaacataaccagtcctccactagcgccgaatgatttgccgagcgatgcaacgattaaggtttgatcgtctagcgtttgaaaattagggcggatgaagccttttcctttctccccaaaagccgacagagcatgcgagtcgtccagatataaaaatagaccatagcgggatttaaggtagatcaaaccgtcaatatccgcttttccacccatgctgtagatgccatcggctacgtaggcgactttcttgtgtttcttacatgattcttcaatgaagtctatgtcattatgcggcgctgttattacttctgtttcatccgcgcaggaggccttcatatagttcattgaatagtgagaatgtctgtcgaatatcatcgtaggggggacgtttttggtaaacgctccgctggcaagtaagggcagtaatccagcgctggccgcgctgcaagataaggtgctcagacagattgagtcgaaagcgttgaaagcgctgtttcatattgttcgagcatgtccagcttgcatctattttttgagttcgctactcgcagggtcttggctttgagtatcccttcgatagcgccatccagtatttgctggttgtaatcaagtccgaggtaggaggtggtgcagaaatgttgaagttcacggccgtattggtcggcaaagcagttgttgcttttgatgattgcattaagttcacaggttagtccttctttggccgattcccagtcttggttggaggtttgaatgatttttttatagtttgagaatttgttggttgacctggagctttccatttttctgtccttggcgatggagagaaataacactaatgggaatttttttgaaggttaagtcaggactttctttttgaggtggcagtcggcggatattttgatgtgtgtaacttcctacaattttcattggcgtgtattcatctgcactgaatgggtaacgagatcaaggcgttttttatcgtggtgtttcgagctatacccagaggcgtcgtacgatttgatgaagtcacctgtcaccctattgagtaaggtggtagtgcaagggcctaatgtgacgatagcctccgaagacctgtctctcaggtagtcaaaaccagcgggatgaagggagtagtagatgagagttctgttattcggtgccaccggcatggtcggccagggcgtgctgcgggagtgcctgctggccgccgacgtgcaggaagtggtcgccgtcggtcgtacgcccctgactcaggaacacggcaagctgcaccaggtgttgcacagcgacatgctggatttccaacccctggaaaacctgctgcaaggctttgatgcgtgtttcttctgcctcggcgtttcatcggcgggcatgaatgaagccaggtacacccacctcacctacgacctcaccctggtcgccgccagcaccctggcgcggctcaacccgcagatgacctttatctatgtgtccggcgccggtaccgacagttccgaggcgggcaagtcgatgtgggcacgggtcaagggcaagaccgagaacgccttgctgcgtctgccgttcaaggcggtgtatgtgtttcggccaggggtgatccagccgctgcatggcgtgcgctcgaagacgccgttgtatcagtggttttattccgtgcttgggccgttgctgtcgtttgtacggcggctgaaaccgggttgggtagtgagtaccgagacggtgggccgggccatgttgcaggcggccagccacggcgcgccgcagccggtggtggaacaggccgggatcaaccggctggccagcgagcgtcgctgatgctgcacaagagcctggtgcgtcggctggacttgatcacgctgcagctgttcgtcgcggtgttcgaggagggcacgctgacccgtgccgccaaccgcgaagccatcgccgtgtcggccgccagcaagcgcctgatggaactggagcaggtgctgggcgtgagcctgtttgtgcggcgggccaagggcatggacctgacggccgctggtgagaccctgctgcaccatgcgcggcagatgttgttcaacgtcgagaagatgggcctggaactgggcgaacacagccatggcgtgcgcggttatgtgcggatgctggccaatctgtcggcgatcattcagttcctgccggaagacctgcgggacttttccagactgcaccccgaagtcaaaaccgacctggaagaacgccccagcaaaggcgtggtgcagggcgtattggatggggtcgctgacctggggatctgctccagtgacaccgacaccaaaggcctgcccagcgtgacctatcgccacgacaaactggtggtgctgatgccgaaggatcacccgctggcaacgcgcgaaagcctggcgttcgtcgacacccttgacagcgattacgtcggcctgcacgccgccagttccatcaacatgcgcacccacgccgccgcccgcgaggcgggcaagctgctgcgcctgcgcattcatgtaccggggtttgatgcgatgtgccggatggttcaggcgaatatgggcatcggcatcctgccgcagaaggcgtacgaattgtttggtcgcgcactgggtttgcatgccgtaccgctgacggacgattggtcggatcgcagcctgatcctggtggtgcgtgatgaaacccagctgtcaccggtcagtcgattgttgttcgattatttgagcgttcgcgtttagcgaacgctgcttgccaactgacggttggatttctcctgcacctggcctctagtcttggccgcacattccaagaataagaggtgcaccccatgacggctcccctgagcggtatcaaggtgatcgagatcggcaccctgattgccgcgccgttcgccgcccggctgatggccgagtttggtgccgaggtgatcaagatcgaaaccatgggccagggcgacccacttcgcaaatggcgaaagctgcacgaaggcacgtcgctgtggtggtacctgcaatcgcgcaacaagaagtcactggcgctggacctcaagtcgccggaaggcctggacctgatcaagcaattgcttggcgatgccgacgtgctcatcgaaaacctgcgccccggcggcctggaaaagctcggcctcggctgggacgtgctgcatgcgctcaaccccaagctgaccctggtgcgtatctctggctatggccagaccggcccgtatcgcgaccgccctggcttcggtgccatcggcgaggccatgggcggcatccgctacaccaccggcaacccggactcgccaccggcgcgggtcggcgtaagcctgggcgattcgttggcgtcactgcatggcgtgatcggcgcgctgatgtcgctgctgcgggtcaagaccggccagggcgacgggcagattgtcgatgtgtcgctggccgaaagtgtgttcaacctgatggaaagcctggtgccggaatacgacatgctcggccatgtgcgtgaacgcagcggcggcgccttgccgggcattgcgccgtccaacacctacctgaccgccgacggggcttatgtggtgatcgccggcaacagcgacccgatctacaagcgcctgatgcacaccatcggccgcgccgacctggccgaagcccccgagtttgcccacaacgatggccgcgccgccaagagtggtctgctcgacgccgcgatcacccactggaccagcagcctgcccatcgagcaggtgctcagcgccctggaagccgccgaagtgccggccggacgcatctactccgtggcggatatcgtcagcgacccgcactaccaggcgcgtgagatgttgctcaatgccgagctgcccggcggtgtgtcggtgaagatgccgggcatcgtgcccaaactctcggagacccccggcggtgtgaactggcaaggcccgaccctgggccaacacaccgacgaaattcttggcagcctgggcctggccggtgccgatatccaacgcctgaaaacctcgggagtggtgcaatgatcacagactattgcgacccgctgatcgtgcaggaagtctccccgcgtgacggcctgcaaatcgagccaacctgggtcgaaacagcggataagatcgccttgatcgatcaactgtccctcgccggtttttcgcggatcgaagccggttcgttcgtttcacccaaagccatcccggcattgcgcgatggtgagcaggtgttccagggtatcgaccgcaagccgggtgtgatctacgtcgcgctgatccccaacctcaagggcgcccagcgcgccgtcgagtcccgcgccgatgagttgaacctggtgatgtccgccagccagacccacaacctggccaatctgcgtatgcgttgcgaagcctcgttggcggcgtttggcgacatcacacggtttgccgccgagcatccggtaacgctcaacggcagcatcgccaccaccttcggttgcccgttcgagggcaggatcgacgaagaccgcgtgctgcagatcgttgacgcttatctcgagctgggcatccagggcatcagcctggctgacaccacaggcatggctaatccgcgtcaggtggagcgcctggtcaagcgcgtgctgcagcgcgtatccgcccgtgacctgaccctgcattttcacaacacccgcggcttgggcctgtgcaatgtgctggctgcctatgaggctggtgcccgtcgctttgacgcggcgctcggcggtttgggcggctgcccgtttgcgccgggggcttcgggcaatatctgcaccgaagacctggtgaacctgtgcgaagaagtcgggattcacaccgggatcgacctgccgcacctgctgcacatgtcccgccgcttgccagccctgttgggccacgagctgcctggccaggtggccaaggccgggcgcaattgcgacctgcatgcgccaccggcctacatcgccacgctgtaacgccgtaccagacaacaaaaacaatcgggcgccgctgagcagcccgctggagagaaaccatgagcactaatacgttggaggctggcgtgcgcccggccgctgaaatcgatgccgaaaaagccctggtcagcaaggtcgcctggcgcctgatgccgctgatcatggtgtgctacctgttcgcgttttttgaccggatcaacatcagctttgccaagtttcagctgcaagcggacctgagcctgagcgacaccgcctatggcctgggtgccggattgttcgtggtgggatatgtgatctttgaagtgccgagcaacatgatgctgtacagggtcggtgcccggcgctggattgcacggatcatgatgtcgtggggcctggccacggcggccatggtgtttgttacggccgaatggcagttctacgggctgcgcttcatcatcggcgcgatggaggcggggttcgcgccgggcgtgctgtattacctgacgttgtggtttccgcagcacttccgcgggcgcatcacgtcgatgctgttcctggcctcggcgtttgccggcctggtaggcgctccgttttctgggctggtgctggaacacctcgacggggtgttgcaaatgcgcggctggcattggttgttcctgctcggcggcttgccctgtatcggcctggggttcctggtgctgacgttgctcaaggatcgcatcgaagacgcccactggctgacggcggcggagaagaccctgctgtcgagccgcatcgccaagcatgagccgaaccagcacggcggttcgttgctgtcggcgatccgcatccctggcttcctgatgctcggttttatctacttcctgatccaggtggcgtcctacggcctcaacttctgggcgccgcaattgatccgcagcgccggtacccagagcccggtgatgatcggcctgctcacggcgattccctatgtgtgcggcgccatcagcatggtggtgatcgggcgcctgtcggatgccaccggcgagcggcgcaagtttgtctgcgggctggtggtgctgggggcggtaggcttcttcagtgccgggatttttgccgaccacactaccttcctgatcattgccctgggcatgttgggcgccggcatcattgcctcgatcccgaccttctggaccctgccgcccaagctgctggccggcgccggtgccggcgcggcgggaggcattgcggtgatcaataccctcgggcagttcggcggcattgtcagcccggtgatggtggggcggatcaaggatctcaccggcagcaccaccccggcgctttacgtgatcggtgtgtgtgcgctgttggcggcggcgctgttgctgtggggactgccgcagaagttgcgcaccctcgataaaggctgatcttgaccgcaaccccgctgattggaggaggaccgttcgtcgcaccagcgagttttttctaaacctttaccgccctcaaaattcgaaatgagggcggggtgtattccccggcccctatttttgccctggaggaacccatcatgagccgcatggctatccggttacgcaccgccagtttcgcgatgctgctgggcctcggcgccagcaatgccttcgcccaatcgcctgctgaattcatcgagcaggcttcggccaaaggcatggccgatatcgaaaccagtcgcatggcccacgccaagacctcgtcccaggaaatcaaggactacaccatcgaggtgatcaacgagcgcaccctggccaaccagcacctggcggccatcgccaagaagctcgatttgcccgtggcgccgcgcgagaagatcgtcgataaagccgaaaccctgatgccagaactcaaggacggcgactccttcgatgcggcctacacggcgcagcaggtgaaggaaaatgaagacgccatcgccttgttcaagcaggaaggcgcggcgtcggatgtgccggaaatcaaagccctggtcgatgagacgttgcccaagctggaagagcgtctgcaaaaggctcgtgccttggcgtcgacctatggcaaaggccatcaaggcgacggttgaacctgttacttgaattgaaaaacggcggttggatcatctccaaccgccgttttttataggctttgctagaacgccatttccgcctggccggtgccctccagcgcgagcaagtattgcttggcttccaaacctccggcaaagcccgtcaagccacctgaggcgccgatcacccgatggcacggcgcaatgattgaaatcgggttgcgcccgttggctgcgcccactgcacggacggcctttgggttgccgatctgctgggcaatctggctgtagctgcgagtttcgccaaagggaatggtcagcagcgcctgccagacctgcttctgaaaatcggtgccggtaaactccagctccaggtcgaactggttgcgggtgccggcaaagtactcgtgcaactggcgttcggtttccagcaacaccgggctgccattggcctcgtgcagctcacccaggcgcacacggttggcgcgttcctcttcccagaggatggcactgagcttgccagcacgcgccacgagggtgagtacgccgacaggcgaaggcatgagcttgtattcgtaggacatgagcgggctcctgggtgggcggggtagcgttgaatctagaacacgccgcccaacgagaaactacgtttcttgcgattgaattcggtttgttcagtggtcttgctgcaacactttaagcgccgctgaggccagaaagccggaacggcttttttcttccgggtggtgcagcacatattcatcgatgcggttcaacagataaccgggcagcgtgatgttgagcttctgcgccttgcccaggtacttggtgacatcaatgtccaccaccgcccaggtgcaacctgcatagtgagggttggcggcgtgcaaggtgaccttttgcgcactgggaatcggtgcaccgtcttccgccaggatttcgaaatgtccttcaatggcttcgcgggccatggccatggcgtcgtccaagtcgtcgccggcggagtagcagccgggaatatccgggacttctacgccccaggcgtggtcgtcgtcgccggttgaaattgcaatcgggtaaagcatgtctgttgtcctccacggacggttaactcagcagagcctgtttcaaaatgctcttggcggtcttgtccaacaggtccttctttggatggggaatcgtcaccagccccggttttgtcgggtgcttgaagtggtggtggctgcctctgatacgtaccagataccaaccgtccgcaacgatgtgacctatcaaatatcggctatccacaacacctccttgtggtgtgtgatggtggtgactataaccactgaattgaaattatcaacactctacctaccagtggtcgatgaccggcattttggcaggtggtcaatggagtgtatgagcgcgacggaatggcgctgcacagaggtattgcgaggttttgcagcggcgttaccgggccggtagcgtctgtgcaatgacggcgagaaacgcatcaaccagcacactttttgtttctgcgcgggtcagtaccaacagctgcgcacacgcatccgcttccaccagcggcctgtacgtcacgcctttattcatcaggctctgcgtacacgccggcaccaacgccacgccttgcccggcggccaccagcgcaatgatcgaggtgatttgccgcccggtcgggcctgggcgtagcggctggccgtggtggcggtaaagctgttcgatggactggttgagccccgagccataatccgctggaaacagaatcaacgggtaggtactgagctgcgccaggctgacgtcgggttgattggccagcgggctgtccctggacacggcggccaccaagggttcctcgcccagggacagcgcttgcaccgcttcgccttgcggcaacaggcggctcaggccgatatccagccgcccatccgccacttgcgcacccaggctgcccgaggcgcattccaccagggtcaattgcacatcgggaaagcgttgggcaaacgcctggatcgcctggctgaacaggtccgacagggcgatcgaactgacatagcccaacgccagttgcccggccgtacctgccgcgagtttgccggcgatcacctgtgccaattccacctgctccagtacgccgcgtgcatagggcaggaatgcgcggccttgcgcggtgagggtgaccgtgcggctggtgcggtcgaacagcttgaagcccagctcggtttccagcgccgagatctgtcgcgtcagcggcggctgcgccaggtgcaggcgaatggcggcgcggccgaagtgcaattcttcggcgacggtcagaaagtaacgcagcttgcgtaggtcgagcatcctggtccttgggtatcgatcggtccgaaatcggtattggttcaagacctgccggccattctataaagacctcacaaaataaaacgagaggtttcatgaaaccgcgcctgcattgtgcccgtcttgccctgttcctgtgtggctgcgcggcgttcctcaacctgtatgccacacagagcattctccagacatttgctacgcagtttcacatcagcgccaaggcggcggggtggagcatcaccgtgacgacgctggccgtggcgatcactgcgccgtttgtcagccgcctgaccgggcgcttcgaaccacgcacggtgatcagcgcagcggctttgctgttggcgctgccgtcactgatgaccgcctgggccgacagctttgccgaagtgttggtgtggcggtgtgtggcggggatgttgatcccggtggtattcgccaccagcgtggcgtatatcggcgaccgctggcgtggcggtacgctgacggaagtcaccagcctgtatgtggcagggaccgtgctgggtgggttcgccgggcgtttcatcaccggcgtcgtgactgaatatgtcggctggcgcgaagcctttgaatggctggcggtgctgagcctgatggtgggtgggtttatccagtttctgttgccgatgagtcgtgtgcgctccgagaaggttcaaccctcgttctcggcggtttttagcaagcccttgctggctgcctacgccgtaggattttgcgtgctgttctcccaggttgccgcgtttacctacgcagggttgtacctcggattaccgccgttcaacctggggcctgcggcgttgggtacgctgtacatggtgttcctgctggcgctgatcgtcatccccatcgccgggcgcctcagcaaatcccggccccacgccgaactgctgagtgtggctgcgctgctgggcatcagcggctcggcgctgacgctggtgccttccttgtggtgcatcgtggtgggcctggccctcagttctaccggcgtattcctcgcgcagtcggcggccaacgcgttcaccacggcgacggcccgtgacaataaagcaggcgctgtgggggtgtacctgacgtgttactacctgggcggcagttgcggcgccattgtcccggcattgatctgggaacgctggggctgggccgggtgtgtggcgctgattatcaccttccaggtgttgaccttgctgatcgccctgaccggctggaaacccgccaaacctcaactgatcccgacgccatgaatgccatcccaccccgccgtcgcacgctgatcgccggctgctgcgcccacgccgtgcatgacggcctgaccgatgtcatctacgtgctgctgccgatctggcaaacacagttcgccttgtcctacgcccaggtcgggctgttgcgcggtgcctattccgggatgatggcggtgttccagctcatggccagccgcgctgcaaaacgctggggccgagtgccgatgctggtcggcggaaccgcgctcgccggcgcggcttacctgttggtgggccaggccaccgggctggtgatgctgttgctggcgctgctgctcggtgggctgggggcgagtagccaacacccgctggcgtcttcgatgatcagcgatgcctatgaggacggtggcggaatcaagcaggcgttgtcccagtacaacttctgcggcgacatcggcaaaaccctgatccccggcctggtgggcctgttgctcacggtgatcagttggcgcgccagtgccacgttgctggggttgctggggttggcggcggcggggttgctgtggtggcttgttccggcgcaaacatccgaatcgtcctcgaccaaaaaagccaaacctttcactggaacaggctccgtcaccggcctgcgcgcactgatcctcaccggcaccctcgacagtgctgtgcgcatgggctttctcaccttcctgccgtttctgctgcaaggcaagggggcgggcaccgccggtattggcctggccctgacactgctgtttatcggcggggcgttcggcaaattattctgcggctacttgggcgcacgcatcggcatgctgaagacggtgtggttgacggagggcagcacggcgctgctgatcgtcgcggcggtgtacctgccgctggacgggttgatggtgatgttgccggtgctggggctggtgctcaatggcacgtcttcagtgctgtacggcgcggtgcccgatctggcgccagccgagaaacgcgaacaggcgttcgccgtgttctacaccggcacgattggtggcggggcgctggcgcccgtggtgttcggcggggtgggggatgcgctgggggtgacggtggcggtgatgctgctggccggggtgttgggggtgacgttgccgttggcgtgggtgattcgcagaggaatgcaactggacggttgataactttttctgacccgaatttcagttccatcctacgtcaggatacagaaggcgaaactgtacagttcggtcttcaaaaatcgcggcgcatgtttcgcatgcctatcagtgagtgaggagtggccgttgcttgataggaagcgatcagactaagctttctatgcgccaatgacgtataggcgtgaatatgatatttatcgagtcacccgcatttacagaagatctgctagggcttctgagtgaggaaagctacggtgaattccaagcgtttttggccgaaaatcccatctccggtgatgtcattcaaggcaccaatggcttgagaaaaatccggtgggccgtgcggggaaggggaaagagcggaggcgtcagagtgatttattatcatgtctgcaaggcctatcaaatcaggttgatcttgatctaccggaagggcattaaagatgacctttcgctggcgcagagaagtgttctgagtgaaataaacagaaggtgggaatgatggagaaaaaactgttcaaccgtctggtcgaaagtttgattcagatggatgagatcgtaagtggcgagcgatctccttctcgcgaattttttgttgatgcgttgaaggtaaaagagattcgacaagccactgggctttcccaagcgggctttgcaaaggcgattgacgtgcctgtaggaacacttcagaactgggagcaagggcgacgtgagccagaagggccggctagagcattgcttcgtgccttacacaacgaccctagtcacgtattggcagcgctggagcatcgataatttccgaggttgtgccttttaagtaaatgaaaaccggctggctgaagccggtttttctgtttgagctgcctgcatcggcgtaatgccctgcgcccttttttcaagttttgcgacattgcctacaccaccttcggaacacgttgggttgtataccatggcatgggctatttatggtttctcagccgctacatcggcacttgatggcaactgcacccagggcaccctggagtgtgccggtatcccgaaagctacccggctcactcgcctgcgtgcagttgccaccctcccgaatcatcaaattcaacgcataaaaaatctatggtcacccccatttttgcaatactgattaacgggtggtgtggttggcttgcttaaatctatccggcgtctgtttggggcttgccccagcgccacgatgagagtcgcgcc

SEQ ID NO: 102 - DNA, 113317 bp, Pseudomonas nodulensis; identical to SEQ ID NO: 26

SEQ ID NO: 103 - DNA, 379786 bp, Pseudomonas nodulensis
  misc_feature (2412)..(2470): n is a, c, g, or t
  misc_feature (299595)..(299614): n is a, c, g, or t
  misc_feature (315556)..(315620): n is a, c, g, or t
tatgtttgccgagatcgatcccgatcagtgctgactcgctcatgatgatggcctccgaaaacaaaacaccctgtgaaagcgtagccctcacagggtgttgggggtgaccatctcattaacccggccaccagggccgggtttgaaagagcgtgggcgcttcagccttgctgggcaggcttgaccagtcgctgttccagttcgctgcacgcttgctggatcatctcttcggtgatctgcacttcgcggccttgggcgtcaatgtacgagcaaggcaactgctgcggctggcggatcacttcaatcttggcatcgctgctgttctgcaaggtcatggcctgtctcctcatcaggttgtgtacctactctaaagcccgcgcgtgaccaggctgttacaactccctgccaggtcagcggttcgaacactcagtccaccagaaaccaatacaaatttccagccaggggttagaccgatagcctctagggatcagcatcggcgggcataattaacctgactcattgctattcgcccaagttccccccatgtaggtgtacagacttctcattggtgatgctctccatgttctcagtccgtcaacgccgtgccattcgcctggccagtcgattcatcgcgccttaccgctggcaggcgcttggcgccctgttggcgctgatcgtcacggccggcatcaccttgtccatggggcagggcatccgcctgctggtggaccaggggttcatgacccagtcgccgcacttgctcaaccagtccatcgggctgttcatgatcctggtgctgggcctggctgtcggcacctttgcgcggttctacctggtgtcgtggatcggcgagcgggtggtcgcggatatccgccggcaggtgttcaatcacctgatctacctgcatccgggcttttatgagaacaatcgcagttcggaaatccagtcacgcttgaccactgacactacgctgctgcaatcggtgatcggttcgtcgctgtcgttgttcctgcgcaatgccttgatggtcatcggtggcatcgtgctgctgttcgtcaccaatcccaagctcaccagcatcgtggtggtggcgctgccgctggtgctggcgccgatcctgatcttcggccggcgcgtgcgcagcttgtcgcgccagagccaggaccgcatcgccgatgtgggcagctatgtgtcagaaaccctcggccagatcaagaccgtgcaggcctacaaccaccaggtgcaggacgaacagcgcttcgccgtcaccgtggaagatgccttcaccaccgcacgcaagcgcatcacccagcgtgcgtggctgattaccctggtgatcatgctggtgctcggcgccgtgggcgtgatgctgtgggtcggcggcatggacgtgatcagtgggcgtatttccggcggcgagctggcggcgtttgtgttctacagcctgattgtcggcagtgcggtcggcaccctcagcgaggtgcttggcgagctgcaacgtgccgccggtgccgccgagcgcattggcgagttgttgcagtcgagcaacgagatccaggcgccggtcgccggcactgtccagttgccggcgcgggtcagcgggcgcatggagctgcaggacctgcgcttttcctatccttcacggccggacagctatgccatcgacggcctgaacctgaccatcaaccctggcgaaaccctggcgttggtcggcccttccggtgcgggcaaatcgacgatcttcgacttgctgctgcgcttctacgacccccagcaaggccggatcctcattgaaggccacccgctgaccgaactcgaccccatggacctgcgccgccacttcgccctagtgtcccagagcccggcgctgttctatggcagcgttgaagagaacatccgctacggcaacccggcggccacccaggaacaggtcgaagcagcggcgcgcattgcccacgcccacgatttcatcctgcaaatgcccgacggttaccagacccacctgggcgacggcggcatgggcctctctggtggacaacgccagcgcttggccatcgcacgggcgttgctggtggacgcgccgatcctgctgctggacgaagccaccagcgccctggatgcgcagagtgaacacctgatccagcaagcgctgccgcaattgatgcaggggcgcactacgctggtgatcgcccatcgactggccacggtgaagaacgccgaccggattgccgtgatggaccagggcaagctggtggcggtggggacacatcagcagttgattgcgagcaatgcgttgtatgcaaggttggcggcgttgcagttcagtgacggggccgaggtcggaaaaagcgaacgttaacgcggcctatgtggtgaacaagcttgttgtggcgagcgggcttgccccgcgttggnnnnnnnnnnnnnnnnnnnnnnnnnnnnnnnnnnnnnnnnnnnnnnnnnnnnnnnnnnnccaacgcggggcaagcccgctcgccacaaatgccagcttggccctcaggcaatgaactcactgatcatcaaaataccgctcatgccaatccaccaacggctgcggtgaattgagcttctgcccgtagatcaccgaataagacagcacgttctgcacatactggcgggtttcgtcgaacggaatgctctctacccacacatcgaagctcaggtggtcggcgccgcgcagccactggcgtacacgaccggggccggcgttgtaggcggcggaggcgagtacgcggttgccgttgaactggctgtgcacttggctcaggtaggcggcgccgagctggatgtttttgtccgggtccagcacctgggccggggaggccagggggatgctgaacttgcgtgcggtttccttggcggtgccgggcatcagttgcatcaggccgctggcgccgacgccggagcgggcgtcgtccatgaaggcgctttcctggcgggtgatcgcgaacacccagctcgaatgcaggccgcgcaccttggcttcacgcaccagggtatcgcggtgggccatcgggaaacggatgtccaggtcgtcccagtactgcgcctggctgatggtgcggatggctgggaagtaccacttcatgtcgtaggccagcttggcctgggcgaccatttcgtcgcggttgaagtgacggctgacgtggtaccactcacgacggccatccaccacctggccgcgtgcatagaactccagggcgcggcgcacgcccggggtattgcgcactttgttgaccagcgcctggctcatcagcaggggtttgttcttcaactggtacggggccttggagcgatcggcggcaaggaaaccgtagaagtcacgctcctgcgccaggtgcttgtacaagaccagcgcttgcgggttcttcggctcggccagttccaggctgcgggcctgccagtagcgccagcggttggtggtggccaggtcttgtggcagtttgcgggtcaactggtaggcatcttcccagcgggccaggcgcagcagcaggcgcaggcgccactcggacacggtgttgtcgcgcaactcgggatcgtacttggtcatcacctcaagggcgcgcgggtcatagcgcttggccagggtgaggccgatttcccgggcgatcgacactttttcgtcacgggagaagtgcatgctgctggcgtagccgtcgagcagggccatggccttgtccggatcctggcgtgccaggcggcgcaggcccaggcctacggcgtcggacatggcctcggtggccggcaggaagcgcgaggggtcgctgagcatgtccggcttttgcgccacgtccaccatcaggcggccttgcgggcccagcgtgcgcagggtttttaccaggctgttggccagcgcgtagttgcgcgcttcggcggcgagtttggcgcggtcccagatcttctgttcggtgagttggccgtcagccgcccattggccaaaggtgacatcgcaggcagccggttgggacttgcctgtcatccagagtttttcggcggtcttgtagccctcggccttcagattatgggtgagctggtactggccgtgcaggcagtccagttcgacgaaattgagcttggcatcgtagtacttttcaaaggtctgccagtcgccgcgttcggccagccagcgcaaccagcgcagtttcatccagttggcctggggcaggtcgccgtttttggcgaggaactgctcgatttcctggttgctcgcggttttcaggcgggcggtcagttcgtcgtaggccagatagggtgtcaacgggtagtcggccagggcctggctgtattgcatgtacggcccggtatcgcccttggccagggcgcgtttggcttcatcgtagtattgacgttgggtggtgaggtccacggcctgggcggattgaacggcggtggcggaaagaagcagacaagataaaaagctgaaaaggcgactgcgcatgagacgtccgtgcagaggaatctggacaagtgccggcatcgccgacactgattgcccctagcttagccttttgcctgacgccggtgaaagctttgacggccgcttcgttcaagttcctcggaaatgtctctcagagtatgtcgactgagaaaatcccggccgcctcagcccctaactcaggtagaatgcgcgcccagtttttggagaagcgtatgaccctgctcaaattcagcgatgtgtcccttgctttcggcgccatgccgttgttggacaaggtgtcctggcagatcgcccgtggtgagcgggtgtgcatcatcggccgcaacggcaccggcaaatccagcatgatgaagctggtcaagggcgaccagaagcccgatgacggctccgtatggcgcgcgccgggcctcaagatcggcgaattgccgcaagaattgccggtggccgacggacggacagtgttcgacgtggttgccgaaggcctcgacggcgttggcgcactgctcgccgaataccatcacctggcacagaactgtgtcaccgaagatgacctgaacaagctgatgcacgtccagcaagacctggaagctcgtgatggctggcgcttgcagcaattggtcgacagcaccctgagtcgcctgcaactgccggcggacaagaccctcgccgagttgtccggcggctggcgtcgtcgcgtgctgctggcccaggccctggtgtccgagcctgatttgctgctgctcgacgaaccgaccaaccacctggacatcggcgcgattgcctggctggaagaagcccttaaggaattccagggcgccgtgctgttcatcacgcacgaccgttccttcctgcagaacctggcaacgcgcatcctggaactggatcgtggtggcttgatcgactggaacggcgactacgccagttttctggtgcacaaggaagccgcgctggccgccgaagaaaccgccaacgcgctgttcgacaagaagctggcccaggaagaagtctggatccgccagggtatcaaggcccgtcgcacccgtaacgaaggccgcgtacgcgccctgaaagccctgcgtgttgagcgcagcgagcgtcgcgagcgtaccggcaaggcgaatatccagctggacaccgccgacaagtcgggcaaacaggtgatggtgctggagaacgtcagcttccatcacccggatggcccgttcttgatcaaggacttttccatggtcctgcagcgcggcgaccgtatcggcctgctgggcgccaacggtactggcaagaccaccttgctcaagctgatgctcaacggcttgcagccgaccagcggtaaagtggaggagggcacgcggatcgacgtggcctacttcgaccagttgcgccatcagttggacctggaaaagaccgtaatcgacaacgtcgctgaaggccgcgactttatcgatatcgacggccagagccgtcacgtgctcagctacttgggcgacttcctgttcagcccgcagcgtgcgcgtaccccggtgaaagccttgtccggtggtgagcgtgcgcgcctgctgctggccaaactgttcagcaagccggccaacctgctggtcctcgacgaaccgaccaacgacctcgacgtggaaaccctcgagctgttggaagaagtgctgctgaccttcaacggcaccgtgctgatggtaagccacgaccgggcattcctcgacaacgtggtcaccagcaccttggtcttcgaaggtgagggcaaggtgcgtgaatacgtgggtggttaccaggactggttgcgccagggcggttccccgcgtttgctgggcgtgaccgagagcaagtccggcaaggccgacttgacctccgccgtggtggctccggtggttgctgctgcaccggcgcaggacgccgcgccggcggccaagaagaaactcagctacaagctgcagcgggagctggaggccttgccgggtgatatcgacgccaaggaacagcagattgccgcggtagaagcgcaaatggctgacgcggggttctacctgcgtccggcggcggaaacggccaaggtcatcgcttccctggagaaactgaaccaggagctggaagtgttggttgagcgttgggctgagttggatgcctgagtgatctcagcgcattaaaaaagcccggcgttcattcgtatgaacgccgggctttttatatcggtcttaaggggcttttaccagcttgacggccagcacatcgcacggcgcgccatgcaggacgtcattggcggtggatcccagcaacagcgccaaaccatgacggccatggctaccgaccacgatcaggtcacaacccttttctttggccaggtggtggatttcctggcgcggttggccgtaggtcaggtggcagtcttcctttttcaggtgcgggtacttgagaatcaaacggtccagacgctctttggcctggtcgaattgttgttgctgcaactgggaaaggtccatcggcacgtcaccgccaaaggccatggccatgggctcgacgatgtgcaccagtgacagtacggcaccattggccaatgcagattcctgcgcgcgcttgatcactggatcgcactcttcggtcagatcgacagcgaccagaatatgttggtagggcatgaggcgttcctccagggggactgcaatagattcagtatggctgctttcaagcggatagggttgcgtcagatcaaatccgctcatctgtaaattcgggagtacacatatgacggtctggatagtggtgtcaatccttgtggtggtgctcagccccctggcatggctgcgcccgtcgcgccaccagagcggacgcatggccctgcgcatggaggcgcgccgcatcggcctggccatgcaactggcgccccaggagtggccgccctggctcaagcaggagccgccgagcccttgcgcgcagtactgccggccacggcgcggcagtacgccggcgatctggtgttattggcagttggagccaagtgtgtgggtcaatcagtggcgtgaagtgtgcgtcgatgaaaagttgttgccgcattttgcgacgctgccggacaacgtctacaagatcgaagccgacaagcagatgatcgccctgtattggggcgagaagggcgaggcgagcgtgttgaaggatatcgatgcgctgctcaaggcgttggcctgaattgcaggcaataaaaagcccgacaatcatcatcgggctggagttggccaggcaggccggtaaatctttggttgcggctagcctagccgcatatcccattctgtacagccttttcccacatcttttctattattgatttcgtgaatatttgaatattggcgaggcgcacgtatgagggcggggttctgaactgactggaaagtcgcgtttttcctagcctttggagcgattgacaattgcccggaattggatgaaggtggcgtacccaaatcaaacgggcgtatgaattgagcgtttgtctgtcagacgactcatacagaatcccgactatcgcattggcgggtgtgcctggcggattggcgtgaacattgaagatttcatcaatgtccaacccataggccagcgtccaatgtgtactgttcagcttccatatcgtggagatcagttgatgatttacgaaggtaaagccatcacggttaaggctcttgaaagtggcatcgtcgaactgaaattcgacctcaagggtgagtccgtcaacaagttcaaccgtctaaccctgaatgaattgcgtcaggccgtagacaccatcaaagcagatgcttcggtcaagggcgtgatcgtctccagtggcaaggacgtgttcatcgtcggcgctgacatcaccgaattcgtcgacaacttcaagctgcccgatgccgagctggtggctggcaacctcgaagccaacaagattttcagcgatttcgaagacctcaacttaccgaccgtggctgccatcaacggcatcgcgttgggcggcggcctggaaatgtgcctggcggcggacttccgcgtcatgtcggccaccgccaagatcggcctgcctgaagtcaagctgggcatctatccaggttttggcggcaccgtgcgtttgccgcgcctgatcggtgccgacaacgccatcgagtggattgccgccggcaaggaaaacaaagccgaagacgccctgaaagtcggtgccgtcgacgctgtagttgccccggacaaactggccgaagccgcactgaacctgatcaagggcgccatcagtggcgaatttgactacaaggccaagcgtcagccgaagctggaaaaactcaagctcaacgccatcgaacaaatgatgtcgttcgaaaccgccaaaggtttcgtggctggccaggccggcccgaactacccggcgccggttgaagcgatcaagaccatccagaaagccgcgaacttcggtcgcgacaaagctctggaagtggaagcggctggcttcgtcaaactggcgaaaacctccgctgcgcagagcctgatcggcctgttcctgaacgatcaggagctgaagaaaaaggccaaggcctatgacgaaatcgcccgcgacgtgaaacaggctgccgtactgggcgccggtatcatgggcggcggtatcgcctatcagtcggcgtccaaaggcacgccgatcttgatgaaagacatcaacgagcacggcatcgagcagggtctggccgaagccgcgaaactgctggtgggccgcgttgataaaggccgtatgaccgcagcgaaaatggctgaagtgcttaacggcattcgtcctacgctgtcctacggcgatttcggccatgtcgacctggtggtcgaagcggtggtcgagaacccgaaggtcaagcaagcggtcttggctgaagtggaagcccaggtcaaagacgacactatcctggcgtccaacacctcgaccatttccatctcgctgctggccaaggccctcaagcgtccggaaaacttcgtcggcatgcacttcttcaacccggtgcacatgatgccgctggtggaagtcatccgtggcgagaagtccagcgagctggcggttgccaccaccgttgcctacgccaagaaaatgggcaagaacccgatcgtggtcaatgactgcccgggcttcctggtcaaccgcgtgctgttcccgtacttcggcggtttcgccaagttggtcagcgcgggtgtggactttgtgcgcatcgacaaggtcatggaaaaattcggctggccgatgggcccggcgtatctgatggacgtggtcggcatcgacacgggtcaccatggtcgcgacgtaatggctgaaggcttcccggaccgcatgaaagacgaccgccgctcggcgatcgacgcgctgtacgaggccaagcgcctgggccagaagaacggcaagggcttctacgcctacgaggcggacaagaagggcaagcagaagaaagtcgccgacccgtcggtgcacgaagtgctggctccggtcatctacgagcagcgtgaggtgtccgacgaggacatcatcaactggatgatgatcgccctgtgcctggaaaccgtgcgctgcctggaagacggcatcgttgaaaccgccgccgaagccgatatgggcctggtgtacggtattggtttccctccattccgtggtggtgcactgcgttacatcgattcgatcggtgtggctgagttcgttgccctggctgacaaatacgctgatctgggcccgctgtaccacccgaccgcgaagctgcgtgaaatggccaagaacggccagagcttcttcggttaagcgcccagacgactagagcgagaatatttatgagcttgaatccaagagacgtggtgattgtcgacttcggtcgcacaccgatgggccgctccaagggcggcatgcaccgcaacacccgtgccgaagacatgtcggcgcacctgatcagcaagctgctggaacgcaacgtcaaggtcgacccgaacgaagtcgaggacgtgatctggggttgcgtcaaccagaccctggaacagggctggaacatcgcgcgcatggcctccttgatgacccagatcccgcacaccgctgccggccagaccgtcagccgcctgtgcggttcgtcgatgagcgcgctgcacaccgccgcccaggcgatcatgaccggtaacggtgatgtgttcgtggtcggtggcgtggagcacatgggccacgtcagcatgatgcacggcgtcgaccctaacccgcacatgtcgctgtacgcggcaaaagcctcgggcatgatgggcctgaccgcggaaatgctcggcaaaatgcacggcattacccgtgaagcccaggacgcgttcggcctgcgttcccaccagttggctcacaaggcgaccgtggaaggcaagttcaaggatgaaatcatcccgatgaacggctacgacgagaacggtttcctgaaactgttcgactacgacgaaaccattcgtccggacaccaccctggaaagcctggcggcgctcaagcctgctttcaatccaaagggcggcaccgtgacagccggtacgtcgtcgcaaatcaccgacggtgcctcgtgcatgatcgtgatgtcggcgcagcgtgcccaggacctgggtatccagccgctggccgtgattcgttcgatggcagtggcgggtgtggacccggcgatcatgggctatggtccagtaccggccacacaaaaagccttgaagcgcgcgggcttgaccatcaacgacatcgacttcttcgagctcaacgaagctttcgccgcacaggccctgccggtgctgaaagatttgaaagtactcgacaagatgaatgagaaggttaacctgcacggcggcgcgattgccctgggccacccattcggttgctccggtgcgcggatttctggcactttgcttaacgtgatgaagcaaaatggcggcaaccttggggttgcaaccatgtgcattggtctcggccaaggcatttccaccgtcttcgaacgcgtttaagcgttgggttgacggaagccggggcccagtgccccggtttttgttttttggaatttttaatattttttttcaacaaattttgtaagagggccagagcatgaaagtcgaaccagggctctaccagcattataaaggtccgcagtaccgtgttttcagtgtggcgcggcactccgagaccgaagaagaagtggtgttctaccaagctctgtatggcgattacggcttttgggtacgcccgttgagcatgtttctggagactgtcgaagttgacggcgagcaggtcccgcgctttgctttggtccaggccgaacccagtcttttttcagggcaataacggcaggtcgcgcagactgctgcgcttgacctcaccttgttgccactatatatagcgttgccgcgacaggcgccaactgcctttcacttctcgaattcaggaattttccgatccatgggcaaatcgctggtcattgtggaatccccggctaaggccaagaccatcaacaagtacttgggcaacgagtacgtggtgaagtcgagtatcggccatatccgagacctgcccaccagcggttcggctagcgccagcaaggagccagccgccaagcgcggcaaggcggctgcgggcgaaggtccggtgctcacccctaaagagaaagcgcgcaagcagctggtctcgcgtatgggggtggacccggatcatggctggaaggccaagtatgaaatccttcccggcaaggaaaaggtcatcgaggagctgcgccggctcgccaaagatgctgacaccatctatctcgcaacggacttggaccgcgaaggggaagccattgcctggcacctgcgagaagccatcggcggtgatgacagccgctacaagcgcgtggtgttcaacgaaatcaccaagaaagccatccaggaagccttctccaagccaggcgaactggacatcgaccgcgtcaacgcccagcaggcgcgtcgcttcctcgaccgcgtggtgggttacatggtatcgccgctgctgtgggcgaagatcgcccgtggtctgtcggccggccgagtgcaatcggttgcggtgaagctggtggtggagcgcgagcgcgagatccgtgcgtttatccctgaagagtactgggaagtccacgctgacctcggcaccgccaagggcgccaatgtgcgctttgaagtggcccgtgagaaaggcgaggccttcaagccgttgaacgaagcccaggccatggccgcgctggaaaagctcaaggcttccagctacagcatcgtcaagcgtgaagacaaaccgaccagcagcaagccgtcggcgccgttcatcacctccaccctgcaacaggccgcgagcaaccgcctgggcttcggtgtgaagaagaccatgatgatggcccagcgcttgtatgaagcgggctacatcacgtatatgcgtaccgactccaccaacctgtcggtggacgcggtcgccatggcgcgtacctatatcgaaagcgaattcggcaagaagtacctgccggagaagccgaacgtctacagcagcaaggaaggcgcacaagaggctcacgaagcgattcgtccttccgacgccaacaccacgcctgccaagctcagtggcatggaacgcgacgctgagcgcctctacgagctgatctggcgccagttcctggcctgccagatgctgccggcgcaatacctgtccactaccgtgagcgtgggcgctggcgacttcgagctgcgtgccaagggccgtatcctcaagtttgatggctacacccgcgtgatgccgcagatcgccaagccgggcgatgatgacgtgctgccggacatggcccagggcgatacgctgaagctgatcaagctcgacccgtcccagcatttcaccaaaccgccggcgcgctactccgaggccagcctggtaaaagagatggaaaaacgtggtatcggtcgtccttcgacctacgcggcgatcatctccaccattcaagaccgtggctacgtggcgctgcacaaccgtcgtttctattcggaaaagatgggcgatatcgtcaccgagcgtctgtccgagagcttctccaacctgatggactacggcttcaccgccggtatggaagagaacctcgatgacgtggcccagggcgagcgcgactggaaaaacgtgctggacgagttctacggcgacttcaagaagaagctcgaggtggccgaaagccctgagagtggcatgcgtgccaaccagccggtgatgaccgatattccgtgccagacctgtggccgcccaatgcagattcgtactgcatccaccggcgtgttcctcggttgttcgggttacagcctgccgccgaaagagcgctgcaaggccaccgtcaacctggtgccgggcgacgaaatcgccgccgatgacgagggcgagtccgagtcgctggtactgcgtggcaagcaccgctgcccgatctgcagcacggcgatggacgcctacctgttggacgagaagcacaagctgcacatctgcggtaacaacccggattgcaacggctacgagatcgaggaaggcacttatcgcatcaagggctacgaaggtccgagcctggagtgtgacaagtgtggcagcgagatgcagctcaagactggccgttttggcaagttcttcggttgcaccaacccgacctgcaagaacacccgcaagctgctgaaaagcggtgatgcggcgccgccgaagatggacccggtgaagatgccggagctcaagtgcgagaaggtcaacgacacctacatcctgcgtgacggggcttcggggttgttcctggctgcgagccagttcccgaaaaaccgtgagacccgtgcaccgctggtgctggagatcgtgccgcacaaggatgagatcgatccgaagtaccacttcctgtgtgaagcaccgaagaaggatccggatggtcgcccggccgttatccgctacagccgcaagaccaaggagcagtatgtgcagtccgaagtggacggcaagccgaccggttggaaagcgttctacgacggtggcaagtggaaggtcgaagacaagcgtcagggcgcttgatccggcggatgcgctgaagatccaatgtgggagggggcttgcccccgatagcagcatatcagtcaacatgtgtatgactgatactccgctatcgggggcaagccccctcccacatttgggtctgtttggttctttaggcccgcataggcagcggtttattgcacttgcagtaggttcggctgatccgtgaaactgttcagccagcatcacgcttattcgttgtggagattgccgtcatggcctacgaactctatacccgtaccaatcagaaaatttacttcgcgggtttgtccctggaagcccttggccgtgccgaggaagggaaggagatgaatgccatcgcgctggtccaggcggggcgtgaagcggcgttgttccacctgtacggcgccttgctgggcctgtgccacgaaatcgccggcttttaccgtctgccccaggccggctcgccccgtgctgaaatgatcatgaatcgcgaagtgctcgattcgatggcgattcctgaattggccgagctggtggaaatggcgcaaagccccgacagttgggttgcacgcctactcaaggcgcatgccgatatgttccaaccgccgcgcattccccatgtgcccaagggggatgtgactcagccgctgattgtggcggttgcggtggaagaggaagaacccaagccgttgagccgcgaagagctggaaggctggcgccaggaattgaaaaaaatggcgttgcgctttcgcgaaggcctcaacgagtgctgatcattctgtaggaattggatagcgaccattcatcaagctgtcaagaaacctgttcagatcctctgcgaggctgggtggatgactgatataatcccggcctttcgtggagaacagacttttatgccgacgtcctttctggaaattgttgagttgcctgacggccgaatcgagctgcgccgggctgaggacgaaggttctctggtcattctggatttttccgaggacgccaaggtgttcctgcagggccaacacgtggaagtggctaaagccatgttgagcgtgggtgtgcagatggcaggtcgcctggcagaaggcgaaccggagaaagaagacgggccgcgggttcttcactgagttctgtggtgaaggagtctggggtggttagacaggcttctgtggtgagctagcttgcttgtagtgagtggacttgttgtggtgagcgggcttgccccgcgcagggctgcgcagcagccctaaatagattgacgcagtacatcaggtattccacggtgcttggttttggggccgcttcgcagcccagcgcggggcaagcccgctcaccacagaagcccgcatgtcacaggacttcggtcgatcagcactagcccaatcgaatattcaaactctgcgcatcacccgtacgagcagcgctgatcaactgctgcttggcgctgacactcagtggattcaaccagctcaccactgtatggctgcggcccaggcgaagtgcttcgcaggtcaactgttgggcactttgcgcgccgcgtggttgcagcagcaggatgcgctcgcgattgaggccggcgtcccgtagccaggcctgggtcaggctggcgggcggggcgatcagtgtcagccagcgggcgtcctgctcttcgctcaactcgcgcaggatgggcgccagcaggctcaggcagctccctgctgcaccgcgcaacgacaattcactgaacgcctcaggctcggcgctccagggcgcttcgatcgtttccttgaggatgggcgcaaggggttgggccatgaaggcctcgaacagcgacagttgtgtgtgttgtggggtgtggacgagctgcatgatgcctcctttagcggcgaatgacgccgacgctcaggccttcgatcaccaggtcctggtctttcaggttcacttcaatcggggcgaactcagggttctcggccaggagccaaaccttactgccttcgcgcttgaagcgtttgacggtgacttcatcgcctatacgggcgacgacgatctggccattacgggcttcgcgggtggtgtggacggccagcaggtcgccgtcgaagatgcccacgtccttcatgctcatgccatggacccgcaacaggtagtcggcgcgagggtggaagaaggtagggttgatgttgcaggactcctcgacgtgctgctgcgccaggatcggcgcaccggcggcgacgcggccgatgatcggcagggtcgattcgtcggccttggcctcgaagccagggatgcgaataccgcgtgaggcaccgggggtcatctcgatcgcgcctttgcgagcgagggccttgaggtgttcctcggcggcgttgggggacttgaaccccagttccagcgcaatctctgctcgtgtcggcgggtagccgttgtcatcgaggcagcgcttgataaaagccagaatctcagcttggcgtggcgtcagttttagcatgttgatcgctctgtctttttatacagtgactgggattatatacagtgaactgcgcttggcaatcatccttttccagccctccgctggacggtcatccctgaggcttcccacaggcccgagatagcgctgcctacagatcaatagagatgtgattaaatagcgatgaaatacatgactgcccggccggaaagcgaactcgcaggcttgacaagacacaccctgaaacgtatgtttcaaacaagtgtttgtcaggcggagtagccatggcccagtcggaaaccgttgaacgcattctcgatgctgccgagcaattgttcgcggaaaaaggatttgctgaaacttcattgcggctgatcaccagcaaggctggcgtcaacctcgctgcagtgaactatcacttcggctcgaaaaaggccctgatccaggcggtgttttcgcgtttcctggggccgttctgcgccagtctcgaccgtgagctcgagcgtcgccagggcaaggctgaccacaagccgacactcgaagagctgctggaaatcctcgttgagcaagcgctggtggttcaaccgcgcagcggcaacgacctgtccatcttcatgcgcctgctcggcctggcgttcagccagagccagggtcacctgcggcgttacctggaagacatgtacgggaaggtatttcgtcgctatatgttgctggtcaacgaggctgccccgcgtattccgcccatcgagctgttctggcgcgtgcacttcatgctcggtgcggcggcgttcagcatgtccgggatcaaggcgctgcgggccattgccgagaccgatttcggcgtcaacacctctattgagcaggtgatgcgcctgatggtgccattcctggctgccggcatgcgtgccgaaaccggtgtgaccgacccgacgatggcggccgcccaattgcgcccgcgcagcaaatccgcgccaacccccgccaaggtttgaccctgccgggtgtgcgcagccgcttgcatccgctaagctagcggcccatgccgaattcagctatttactcgcaacctgttgtgctcactgtgcctggtgggtgcaatgggttgtgcgcgttatataaggaagatttatgactgctgccctgcaaggttcattgatggtcgacgttgccggcacttggctcacggccgaggaccgccatctgctgcgccagcctgaggtgggcggcctgatcatttttgcacgcaacatcgagcacccgcgccaggtgcgcgagttgagtgcggcgattcgtgcagtgcgcccggacctgctactggcggtcgaccaggaaggcggccgcgtacaacgcctgcgtcagggctttgtgcgcctgccggccatgcgtgccttggcggataacccgaatgcggaatacctggccgagcagtgcggctggatcatggccaccgaagtactggccgtgggtctggacctgagcttcgccccagtgctggacctggattaccagcgcagcgctgtggtcggcacccgttccttcgagggcgaaccggagcgcgccgccgtgctggcgggtgcattcatccgtggcatgaacagcgccggtatggccgccaccggtaagcacttccccggtcacggttgggccgaggccgattcccatgtcgccattcccaatgatgagcgtagcctggaacagattcgcgccaatgacttggtgcctttcgcacgcctgagtcagcaactggcggctgtcatgcccgcgcacgtcatctacccgcaagtcgacacccagccagccggcttctcgcgccgctggttgcaagacatcctgcgcggtgagttgcagttcgatggggtgattttcagcgatgacctgtccatggcaggtgcccatgtggtgggcgatgccgccagccgcatcgaagcggcgctgacagctggttgcgacatgggactggtctgcaacgatcgcgcagctgccgaattggcgttgagcgccgcccagcggatgaacgtcaagccttcggcgcgcatcgcacgcatgcgcggccagacggtcgcctcgactgagtacaaacaggatccgcgttggttggcggcgctgactgcgttgcgggatgctcagctgattgagtgaagaccgcgtcgcgcccatcgggggcaagccccctcccacattttgatctgtgaacctggtcaagtgtgggagggggcttgcccccgatggcgatgttaccgtcaacgcttctcttgcttatgcggcaacggcgcaaacagcgcttcgatatcctcgttgcccaattgccaatccccggtcgtacggccatccagcacacctgccgccaggtcggacttttccttttgcaggtgctggattttctcctccaccgtgccgcgggcaatcatcttgtagacaaacaccggcttctcttgaccgatgcgatacgcacggtcagtcgcctggttctccgtcgccgggttccaccaggggtcatagtggatcaccgtgtcggcttcggtcaggttcaagcccacaccaccggccttcaggctgatcaggaaaatctgcagcttgccgctctggaagtccttcaccggcgtgcgccgatcccgcgtctggccggtcaacaaggcgtaggcaacaccgcgctgtttcagctcggcttcgatcaggctcaacatcgaggtgaactgggaaaacagcaggatccgtcgaccttcctcaaataactcctcaagcatttccatcaagctatcgagcttgcctgaactgctgccacgggcgggcagggtggcgtcgttgaccaggcgcaagtcgcagcacacctggcgcaacttcagcagcgcctcaagaatgatgatctggctgcgtgccacgcccttgcgggtgatctcgtcgcgcaccttcttgtccatggccaggcgcatggtttcgtacacgtcgcgctgggcctcgttgaggtcgacccaatggatgatctcggtcttgggcggcagctccgtagccacttgttccttggtgcggcgcagcaggaagggtttgatccggccgttgaggtgctgcagtcgtacgtcgctggcgcgcttttcgatgggtacgcggtagtcgcggttgaagctttttacgtcacccagccagcccggcagcaggaagtggaacaacgaccacagctcacccaggtggttttccagcggcgtaccgctcaggcacaggcgctgccgcgcattcagttcgcgtgccgcctgggccgccttgctggacgggtttttgatgtactgggcttcatcgaggatcagcacatgcaggggcagcgccttgagctgttcgatgtccttgggcagcaaggcgtaggtggtcagcagcaggtcgtagtcctgcaggttcgcaaaatgtttcttgcgagctgcgccgtacagcgccaacaccttgagttgcggcgtgaagtgcgctgcttcatccagccaattggggatcagactggtgggcatcaccaccatacaggggcgatccaggcgcccggcgtttttttcgctgagaatatgcgccagggtctgtaaggtcttgcccagccccatgtcatccgcaagtatcccgcctacatcgagctggcgcagcgactgcatccaactcaagccttccagttggtacggacgcaaggtcgcgttcagcccttcgggcgccacgcaggtgaaatccttgatgtcccgcaggcgttgggcgaagttgcggattttttcgccaccttcccattgcagcggcaggtcttccagcgggttaaggcgaatcgcatcggccttggccaggcgcagcgtggtggcgccggcttcctgtagataaaactcaccgagggtggccagcaccggtttcagtcggccataaggcagcgccacttgtatcgggccgtggccattgggcaggccagggatattcaccaggatcagctcatcatcgcggcgccgcgccagtttctccgggttgaggatctcggtgtgggagcgcatcaggttcagcagaatcggcaacaggctcaggcgctcgccgttgacgatgatccccagctccaggtcgaaccagtcgcgctccggcccttcatcaaccgtggcataccagtcatcgacggcgctcaggtcgaagccgaaatcatcatcgatcagcagctcccagccctcggcccgcaaggtcggcgtggcattgagggtgaaggtcagccaggcactgtcattgaccatctcgaacaactcgccggcgctttccggcagggccttgctctggcgcgtggcgatcttgaaacccagcaggcgcagttgctcgcggtacggctgttccagctcgggatggcgcttgatgcgcaggctctgggtgtcctggcgcacgatgatgtcggcgtttttctgcccgctgacatagttgcccaaataattgaacgacagcgccgcccgatgctggatatagcgctgcatcttgccgttgcgtggttcgaacgcgctgaactcaacactggccatccacaggcgcggcaccggcaccacatcttccatgaccacctgcggcaacaccgcgcggttttccaggactgcctggagcttttccagcagctctgcatcctgggcggcagcggggaaggccagggtttcctggaccttgagcagtaccgccgcgatgtgtttgcagttggtgtgcaccgggcaagtgcagcggctgtccaccagaatcaacgtgcccttggccgattcgcgcagcgaaatggtctgccggtagacgttgccgcctgagccttcgcaactggcgatgatggtgctgtcgccggattcgacgatgcgcacccggttctccagggcataacgccgcccgcgctcaaggctctgctctttaaagcgattggcccacgaaggggccaggggtttggtcagcgacgacgtcaggggcatggcgttggatcagtcctggaggtcgggcggtggtgcgctgggtggcttggcggtcagcgaggtgattttgatcagcaacgccaggtggccgccgtccaggtagttgagctggttgttcttggtgcgcacgtcggtctggctcaggtgttcgctggcgatcacgctgccgttggcatcaaactggttgatccagaagttcgcgtcgatatcagtaaagcgccccagttgcaggttcagcacgccctcgatggggaactgcccgaactgctcctggccgtcggtgatggcgactttgacaggctgctcgcccaggttctgttcccaggccttatgcagcagcaccgtgtaggtggagtcggcgcgcagcttatcgacaatgttggacaggcgcggcgggctcagccgatcgcccaggcgcgcagcgccagcatcccagttttccggagcggcacggctgttgatcaccggttcggcgttctggcgcaccaggatcatttccacctggtacgggctgtcggcgaacgccgcaggtgccacgaccaccaacaacaggctcaacatgcggaacaggcgcattcgggcgtccttcaagcaggtttcgggatgaggcgctcgaacaacgcctccaaggtattaaagcgttcttcggcacgttccatcggcaccatgaacttgaacagcgtagccccttcgaacttgtagcggttgggctggccctggatcagcttgatcagcaccaacgggtccacgggggtctgcgcctcgaattcaatgcgcccaccctgcggcccggcgtcgaccttcttgatccccagttgctcggcctgcaatttgagcagggtcaggcgcaccaggttcttggtcggctccggcaacaggccgaagcggtcgatcatctccacctgcaggtccttgaggccttcttcgtcggtggccgaggcgatgcgcttgtacaggatcagccgtgcgtgcacatccggcaggtagtcctcgggaatcaacgccggcaagcgcaggttgatctccggaccgccgcccaatggttgatcgaggttcggttgctcgcccttgcggatggcttttaccgctcgctcgagcatctccatatacagcgtgaaacccaccgcctggatctgcccgctctggccatcgcccagcagttcgccggcgccacggatttccaggtcgttggtggccagtacaaaaccggcgcccaggtcctgggtgttggcgatcgcttccaggcgtttttccgcatcgccggtgatttgctggcgcggtggtgtcagcagataggcataggcctggtggtgactgcgcccgacgcggccgcgtaattggtgaagctgcgccaggccgaacttgtcggcgcgctcgatgatgatggtgttggcgctcggcacgtcgatgccagtctcgatgatggtcgaggcgatcagcacgttgaagcgcttgtggtagaagtcgctcatcacctgttcgagttcgcgctcgcgcatttgcccatggccgatggcgatacgcgcctccggcaccagctcggccaggtcggcggcgcatttttcgatggtcttcacgtcgttgtgcaggtaatacacctgcccgccgcgcagcagttcgcgcagcagtgcttccttgaccgtgctcttgttctgctccatcacgaaggtgcgcaccgacaaacgacgcgccggcggcgtggcgatgatcgacaggtcgcgcatgcccgacaccgccatgttcagcgtgcgcggaatcggcgtggcggtgagagtgaggatgtcgacttcgctgcgcagggccttgagctgttctttctggcgcacaccaaagcggtgttcttcgtcgatgatcaccaggcccaggttcttgatcttcacatcatccgacagcagcttgtgcgtgccgatcacgatgtcgatcttgccttcggccagatcggcgacggcggcgctcacttccttggccgacttgaagcggctcatcacttcgacagtcaccggccaatcggcaaagcggtcgcggaagctgttgtagtgctgttgggcgagcagggtggtgggcaccaggattgccacttgtttgccgccatgcaccgcaataaaggcggcgcgcatcgccacttcggtcttgccgaagcccacatcgccgcagaccaggcggtccatcggcttgggcgcgagcatgtcggcgcgcactgcttcgatggtggtttgctggtccggggtttcttcgaaggcgaagccggcgctgaaagtggcgtagtcggctttcgggtcggcgaacgcgtaaccctctcgggcggcgcgacgtgcatagatgtcgagcagctcggcggcgacgtcgcgcacctgttcggcggccttgcgcttggctttctgccaggtttcggagcccaggcgatgcaacggcgccagggcgtcgtcgctgccggtgtagcgggcgatcaggtgcaggctggctaccggcacatagagcttggcgccttcggcgtattccatggtgaggaattcggcggcctggttgtcgatctccagagtctgcaggcccaggtaacggccgacgccatggtcgatatgcaccaccggcgcgccttcacgcagctcggtcaggttcttgatcaccgcgtcgttgttggcgtcggcgcgtttttcacggcggcggcgctgcatcacgcgttggccgaacagcgggctttcggcaatcaatgccaacgctggatcgtccagcagcaggccttcgtccagtggtgcgatggtgatcgccaggcggtctttgctcgccacaaaatccggccagctgtcgacggtcttggggcgcagcttcaggcgttcgagcagttccagcagtacttcgcggcggccggcagactcggcggtaaacagcacgcggcctgggaagtcgccgaggaagttggacagcgcatccagcggttgcgtggctttggcctggatcgccaggtcgggcaacgtgcccgcggggaagcgttcgcgaccgacaccggtgtcgacctcctgctggctagcgaccacgcgcggccagtttttcaggcgtgcgaagcagtcttccaccggcaggaacagctcggcgggcggcaataaaggacgggatgggtcgacgcggcgttcttcataacggttacgcacgtcgttccagaagttttccgctgcttgctcgatacctggcagcgagaacacttgggtgtcctggggcaggtaatcaaacagggtggaggtttcgtcgaagaacagcggcaggtagtactcgataccggccggtgtaatcccgctgctcaggtcctggaagatcgggcagcggcggaagtccacgtcgaagcgttcacgaaagcgcgccttgaagcgggtgaccgcgtctttttgcagcgggaattcccgtgccggcagcagcttgatcgagtccactttgtcgatggagcgctggttctcggggtcgaaggtacgcagggtctcgatttcgtcatcgaacaggtcgatgcgatagggcagtttgctgcccatcgggaacaggtcgatcaacgcaccgcgcaccgcgaactcaccgtgctcgtacaccgtgtcgacgcaacggtagccgctggcttccaggcgcgtgcgcatctgttctacatcgagcttctggccgacatccagcaccaggctgctgcccagcaggaacttggtcggcgccaggcgatgcagtgccgttgttatcggcaccaccaacacgccgtgggccagttccggcaggcggtacagactggcgatgcgctgggagatgatgtcctggtgcggcgagaacaggtcgtagggcagggtttcccagtcggggaaatgcagcaccggcaaatcgggggcgaagaagctcagctcctgctccaaccgttcggcgctttggctgtcggcggtgagcagcagggtaaagcgcttggctgcgctggcagcctcggcgatagccaggctcagggcggcaccgggcaggttgccccagtgctgtttacctgcttcggcagggagtagcggtagacgcagaacgggcacggaaggttgagctccaagcgttgcgacaaagtcggtaattgtaacggcccgaggtgccgcctgtcagtttctgactgagcctattacggtttgtaggaaatgtggtggctaagacaaacaatggcgtgttttgactcaatatgtagtgccgaaatacgcgattgtttaggagggttacggacaagtcggccagttctcccaactggtggccttctggaacccgcgtatttactgggctgtagcggggcggtattttttggcaaggggtttttgttgtggggcgcgcattgctccgagggcggtcgggcggcataatgtagccccttttttcagcccctacatgtggaaggttcccgtgactcagaagcccgaccagtgtcttggtgaatggatcgaccgtgaagcactcgcagaagcgatgatcccgcttatcggtcagctgtaccgcaataacaatgtggtgagctcgatctatggccgcagcctgatcaaccagtccgtcatcgcgattctcaaagcgcaccgctttgcacgccatcgctctgccgacgacagcgaactctccgtccacgaaacattcccactgcttaaagccatgagcgagctcaagctcggcgcggcctcggtagacctgggcaagctggcctacaaattccgcaaggaaggcgccggccgtaccgccgagcagttcgtgcgtgaagaaatggccgatgtggttggccagcaaaacgccgcggcccgcaaaggcaccgacgtggtgctgtacggcttcggtcgcatcggccgcctgctggcgcgcatcctgatcgaaaaaaccggtggcggcgacggcctgcgcctgcgggccatcgtggtgcgcaaaggcgccgagaacgacctgaccaagcgtgccagcctgctgcgtcgcgattcggtacacggtccgttcaacggcaccatcgtcatcgacgaagaaaacaacaccatcaccgccaacggtaacctgatacaggtgatctacgcgaagaacccgtccgaggtggattacacccagtacggcatcaaggacgccctgctggtggacaacaccggtgtatggcgtgacgccgagggcctgggccagcacctggcctgcccgggcatcgaccgcgttgtgttgaccgcgcctggcaagggcaagctgaagaacatagttcacggcatcaaccacgctgaaatcaccgctgacgacaagatcgtgtccgccgcgtcctgcaccaccaacgccatcgtgccggtgctgaaggcggtgaatgacaagttcggcatcgtcaacggccacgttgaaaccgttcactcgtacaccaacgaccagaacctgatcgacaacttccacaagggcgatcgccgtggccgtagcgccgcgttgaacatggtgatcaccgagactggtgcggccaccgctgcagccaaggcattgcctgagctggccggcaagctgaccggtaacgcgatccgcgtgccgacgccaaacgtgtcgatggccatcctcaacctgaaccttgagaaagccgccacccgtgaagagatgaacgagtacctgcgctacatggcgttgcactcggatctgcacaagcagatcgacttcgtcaactcgcaggaagtggtctccaccgacttcgtgggctcgcgccacgccggtgtggtggacgccgaggcgaccattacccaggacaaccgcgttgtcctgtacgtgtggtacgacaacgagttcggctacagctgccaggtggttcgcgtgatggaagacatggctggggtcaacccgccagcgtttccgcgctaagcacccgcgttgaataaaaaagccccgactggttcggggtttttttgtgcctggggattttgtgctggctggaagggcctcatcgggggcaagccccctcccacatttaaactgcattcctgcagggttaatgcggtccagtgtgggagggggcttgccctcgatggcgtcagttcagacaatacatgtctttattccagcaacctctccgacaagcccttgggcgctaaccagatccccaggtaagccctcgccagctcatcgtcgttgctgctgaacagcacttccccattgatctccaggttcaagccgcgtccgggtcgaaaatccagtgcgtagcgatcaccgctatgaatgttgcgaaagacggcatgcagtttgtccacttcgggtttcaagcggtcgctgacgtgctggcgctccagcgtggtattggcggccttgatcacatcattgcgatcaatatcgcgaaagtaatacagctccaggcgcagcgtcttttgctgtttccaggctgactctgcgggagtgtcggctggggcatacagcgccgcggcgtatacatcggcccaaagataggtcagtactgcctggtttttcagtgccaattcatgagactgcggggggaaacctgcctgcttgagtcgggcgacttcattggcttgcaccgtgaacgaaaacatcagtaataaacagaaagcgacatgccgcataatggctcgtcctgcaaaggtgcgtgccgacagtgtaattgcaatttcctgagcgtgtagtagaggcaatactggcctacgacgcgaccaagggttaatgtgcgcggcgttgagccttatatagactgtgccccggttcacacacttgagccaaattgtccttcatgaccgctggcgcggcatgatttagcccggcgtccaaccgtacgcctggcctgttctgaggagtacgcatggctgtctacaactacgacgtggtggtactgggttccggcccggctggagaaggtgcggcgatgaacgctgccaaagctgggcgcaaggtggcgatggtcgatagccgtcgccaggtcggcggtaactgcacccacctgggtaccatcccgtccaaggcgttgcgtcactccgtgcgccagatcatgcaattcaacaccaacccgatgttccgggccattggtgagccacgctggttctcgttcccggacgtgctcaaaagcgccgagaaagtcatctccaagcaagtcgcctcgcgcaccggctactacgcccgtaaccgcgtcgacctgttcttcggcaccggcagctttgccgacgagcaaaccatcgaagtggtctgccccaacggcgtggtcgagaagctggtggccaagcacattatcatcgccaccggttcgcgcccgtatcgcccggcggacatcgatttccaccacccgcgcatctacgatagcgacaccatcctgagcctgggccacaccccgcgcaaactgatcatctacggcgccggcgtgatcggctgtgaatacgcatcgatcttcagcggcctgggcgtactggtggaactggtggacaaccgcgaccagttgctgagcttcctcgactcggaaatctcccaggcgttgagctaccacttcagcaacaacaacatcacggtgcgccacaacgaagagtacgagcgcgtcgaaggcctggacaacggcgtgatcctgcacctcaagtccggcaagaagatcaaggccgacgccttgctgtggtgcaacggccgtaccggcaacaccgacaagctgggcatggaaaacatcggggtcaaggtcaacagccgtggccagatcgaggtggacgagaactaccgcacctgcgtgccgaacatctacggcgccggtgacgtgatcggctggccaagcctggccagtgctgcgcatgaccagggccgttcggccgctggcagcatcgtcgacaatggcagctggcgttatgtgaacgacgtgccgaccgggatctacacgattcccgagatcagctcgatcggcaagaacgagcacgaactgaccaaggccaaggtgccttacgaagtgggcaaggcgttcttcaagagcatggcgcgtgcgcagatcgccggtgagccccaaggcatgctgaagatcctgttccaccgcgaaaccctggaagtcctcggcgtgcattgcttcggctatcaggcgtcggagatcgtgcacatcggccaggcgatcatgaaccagccgggcgagctcaataccctcaagtacttcgtcaacaccacgttcaactacccgaccatggccgaagcctatcgggtagcggcctacgacggcctcaaccggcttttttgagcggctccggccggtggcctgagccggccggggagaccgatttcagtaattcccgagggtggcagtggccaaaccgggaaagtctgtaatcaggctatctacgccgaagtcggcgagcctgcgcatcagcgcgggttcgttgactgtccacacggacacgtgcaagccctggcgctgggctttttccagtcgctcgggggtgcacagcgtccagttcaacgccagaatctcacagccatagttctgcgcgaccttcaacgggtcgagccaggcatattcggcaaccaggccgcgtgacaggtccggggtgagttcaaccgctgctttcagcacttcccgcgaacttgaggtgacggtgactttgtccatcaggccaaagcgcacggccatttcacgaatggccagcaccgtggtggcggcgcgggtgcgtgaggcgcttttgacttccagttgccagtgatcgaagtcgcattgttcgaacagttcttccaggcgtgggatcgggcacggcttgacccagcccgggccgcctttgcgcgcgtccatcttcaccaggtcggctgccgaatactccacgaccttgccgcgccggtcggcggtgcgcttgagggtcgggtcgtggatgaccatcaactcgccatccatggacaggtgcaagtccagttcgcagcggcgtaccccgtgcttgaggcattcctggaagctggtcagggtgttttccggtgcttcgcctttggcaccgcggtggccgtaaatcagggtcacagttgctcctatgcgccaggtctgctggcggggtaatacgaattcaggtgtcttgggcgtcgctctgttcccgcgccaggcgccgttcctgggcctgtttctgcaggatgtaacgcgccagcagctggcgttgggcgtcagtcatggcttcgaattccgtgccgacgtcaaaacctgtgcccttgggatcgcaatgggtgacccgggcgcgcagcagcaggccaagcgcctggggcatcagcaccagcttgaccgccaggtgcgcaccgggcgacaggggcgtggggttttggaagtcgataccgccctcggaaaggatcaccggctgcggtgcgccaacttcatccagcaggccgcgcgccatgatctggctgagcaggtccaggcgtttgttctgtactttgaggaaggcggccaggctgcgatctttctcatttatctggcgcaacaggtgctgggcctcgaattcactcaggtgcagttcactgagcagattgaatagcggcgaatcatccagcaacacttccttgctcgccgcttcgggagcagacaggcttttgatttggagtgcgatcatgtcgtcgatacggtagtattcgcggcgttcttcttcatctaatgtcgacatggcgaaccccaagtagcgttaatggtctgagtgtaaagctgcttaccagaccccgccaccgggacgtcttcttttcctccgaacaagccccgacatgttcagacctctcttcgtatttatcggcacgcgttatacccgtgcaaagcgtcgcaatcattttgtgtcgttcatttccctgacctcgatgatcgggctcgccttgggcgtggtcgtgatgatcgtggtgctgtcggtgatgaatggcttcgatcatgagatgcgcacccgcgtgctgggcatggtgccccacgcgaccatcgagggcgatgcgcccatcagcgactggcaaagcctggcggccaaggtcaagcagaaccccaaggtattggccgttgcgccatttacccagatgcaggggttgctgaccaacgacggcaaggtgcagaagatcctgctcaatggcatcgacccggcccaggaacgtaacgtgtcgatcatcgacaagttcatgttgtcgggcaaactcgatgacctggcgcccggcgagttcggcatcgtgatcggcgacaaggcggcggccaagctcggcgtgagcctgggcgacaagctgaccttcgtcgcgccggaagtcaccgtgaccccggccggcatgttcccgcgcatgaagcgctttaccgtggtcggcaccttccacgtcggcgccggcgagatcgacggctacctcggcctgaccaacctcaccgacctggcgcgcctgcaccgctggcagccggaacaggtgcagggcctgcgcctgaagttcaacgacctgttcgacgcgccgcgcacttcatgggaaatcgcccagcatttgggtgacagccagtactacgcccgcgactggacgcgaacccacggcaacctctaccaggccatccgcatggaaaaagccatgatcggcctgctgttgctgctgatcgtcgccgtggccgccttcaacatcatctccacgctggtgatggtggtgaacgacaagaagggtgatatcgccatcctgcgcaccctcggcgccacaccggggcagatcatggtgatcttcatggtgcagggcaccgtgatcggcgtggtcggcaccttgatcggcacggcggtcggcatcctggcggcgctgaacgtgagtgccgccatcgctggcctcgaaaccctgatcggccacaagtttctcaacgccgacgtctacttcattgactacttgccgtcccaggtgcaggcccaggacgtgttgatggtgggcggcgctgcgttggtcctgagtttccttgccaccctgtatccagcctggcgcgcggcacgtacccagccagcacaggccttacgttatgagtgaatcgggcatgagtgaaaaagcaatcctgagctgccgcaacctgggcaaatcctacgaggaaggcccggagtcggtggtcgtgctgtccaacctgcaacttgagctgcacccgggcgagcgcgtggcgatcgtcggcagttccggttccggtaaaagtaccttgctgaacctgctgggcggcctggatacgccgtcccagggcagcgtgtggctggccggtgaagaactgtcggccctcggtgagaaggcccgtggtcagctgcgcaaccgttcgctcggttttgtgtaccagttccatcacctgttgccggagttcaccgccctggaaaacgtgtgcatgccgctgctgatcggcaagaccgcgatcccggaggcccgccagcgcgccaaggccctgctggagcgcgtcggcctcggtcatcgcctggagcacaaaccggccgaactgtccggcggcgagcgccagcgtgtggcaatcgcccgtgccctggtgaacaacccgggcctggtgatgctcgacgagcctaccggcaaccttgactcccacacggcccagggcatcaaggacttgatgctggaactgagcacccagatgcgcaccgcgttcctggtggtgacccatgacatgagcatggcccgtcagatggaccgcgtgctgcacctgcaggaaggtcatctggtcgccatctgacccgtttcaagcccggtgcttcatgcgccgggctttttcattttttcaggcggtgcaagcgaatgttcagaccgttatcgattttcatcggcacgcgctatacccgcgccaagcgccgcaaccgttttgtctcgtttatctcgatgacctcgatgatcggccttgccctgggtgtgctggcgatgatcgtagtgttgtcggtgatgaacggcttccagcgcgaaatgagctcgcgcatccttggcatggtgccccacgccaccatcgttggtgtgaacccgattgataattggcagcccgtggccgccgctgcgatgaagaatccggaagtcaccgcagcggtaccgttcacacaaatggacggcatgttctcctacaaaggcgcgatgcagccgatcgagatcagcggcatcgacccggcacaggaaggcaaggtgtcgatcgtggcccagcatatcgtgcagggcaaactggatgacctcaaacccggcgaattcggtgtagtggtcggcgaaatcaccgcccggcgttttcgcctgaatgtgggcgacaagctgaccctgatcgtgccggaaatcagcaccgcgccgggtggcatcaccccgcgcatgcagcgcttgaacgtggtggggatcttcaaggtcggtgccgagctggatggctccatggccatgatccatatggccgacgctgccgagatccagcattggcagccgaaccaggtgcaaagcgtgcgcctggcggtgaaagacctgtacgcggcacccaaggtctcggcagacatcgccgccagcctgggcaccgcctacaagcccgatgactggacccacacccagggcagtctgttcagcgcgatgaagatggaaaagaccatgatcggtctgctgttgctgatgatcgtcgccgtggcggcgttcaacatcatcgccaccttgatcatggtggtgaacgacaagggcgcggacattgcgattttgcgcaccattggcgccacgccacggcagatcatggcgatctttatggtgcagggcacggtgatcggcatcgtcggcaccttgatcggcggcgtattgggcgtgatcgcggcgctgaacgtgagtgaactggtgggttggatggagcgggtcaccgggcagcatatcttcagttcggacgtgtattttgtcagtaacctgccttcgcagctgcaaggtggggatgtggtgctgatttgcacggctgggtttgtgctgagctttttggccacgctgtacccggcgtatcgggcggcgaagattgagccggcgcatgcgctgagatattcgtaatattcaagaccgctatcgggggcaagccccctcccacatttcgaatgtattcacaaatcaccctgtgggagggggcttgcccccaatagggccggtacagcttgcatcaatctccagcaggcaactcaatcacaaaccgcgtccaccccgtcccggattcacaataaatcctccctccatgcgcccgcacaatcgactgggtaatcgccagccccaaccctgcatgctcgctgctgccttcgtgccgtgccggatcggcccgatagaagcggtcaaacaaccggggcagcaactcggttggaatgccgtccccggtgttctctactgaaagtttcaccccatcctcgatttgcacacgcacttcgccgcctggcggggtaaagcgcagcgcgttatccagcagattcgacagcgcccgccgcaacattccacggtcgcccatcgtatgggccgtgccctcgcgaaccaggctgatctgcccgtcctccgccagcagcgtgaaaaactccagtaacgcatccacttcatcggccagtgccaaaggctcgcgcttgggcatcagtaggccatgatcggccttggccaggtaaagcatgtcattgaccagttgcgccatccattgcagctcttccaggttgctgtgcagcgcctcgcggtaatcctccagcgggcgtggctgggtgaggatgacctgggtctgagtcagcaggttcgacagcggtgtgcgcagttcgtgggcgatgtcggcggagaacgccgagaggcgctggaacgcatcgtccaggcggccgagcatggcgttgaaggcctgggccagttcggccagttccaccggcatatgttgctggggcaggcgctgggtcagggagtgggccgacacactggcggccacttcgcccatgcgtcgcaatggccgcaacccgctgcgggcagcccaggcgccgagcagggcggtggccagggctgacaagccgacggtgagccagatcagatgctgcatgcgctgcaggaaatgctggtggtgggtgatatcaagcatcagcgtcagttgtggcgagtcgggttggcccgccctcagcggcgcgttgtagacccggtagtcggtgtcggcattttgcaggctgtgcaggccgggggctgcgggcaagtcgacgctgggggcatcgtccagccagcgttggccggcggcggtgatacgcagggtaaggtcgggctggcgcctgagttcggcgcgcagttgcgcctcacgctgggccagggcttccggtgaatcgaccccctgcaaggtactgcgcagcgccaccagcttgctgtcgagctgttgctggtccagctcgatgaagtgcgcttcgctggcgcggttgaacagcacaccggcgatcagcgacaccaccgccgtgcaggcggcaaacagcaacgccaggcggctggccagggacaggcgcttgatcaattgacccgttcctccagcacatagcccatgccgcgcacggtgtggatcagtttgttggggaagttatcgtcgactttcaggcgcaggcggcggatggcgacttcgatgatgttggtgtcgctgtcgaagttcatgtcccatacctgggaggcgatcagtgatttgggcagcacttcgccctggcgccgcagcaacagttccagcagggagaactccttggcggtcaggtcgatgcgctggccgtcccgctcgacgcggcggcggatcaggtccaggcgcaggtcggccagttgcagcgcagtttcctggggcgtgctgccgccccggcgcaataggctgcgcacgcgggccagcagctcggaaaaggcgaacggcttgaccagatagtcgtcggcgcccagttccaggccgtgcacgcggtcttccacggcatcgcgggcggtgaggaacagtacgggaatgtccaggccggcgctgcgcacggcttggaggatctgccagccatcacggcccggcagcatcacatcgaggatcagcaggtcgtagtcgccggtcaatgccaggtgctggccgctggtgccgtcggccaccagttcggtggtaaaccccgcctcggccaggccctggcgcaggtagtggccggttttgggttggtcttcgacgatcagcagtttcatgggcggctcttggcaacggtggacgacggctttataccttgggtgccagggcaggagggcaacctgacaaagttgtaatctagcagtcagctggctggcagcggcgcattcttagagtgctccccaggcgagtcacacatttttggagaaaaccgatggcgttgcgtacacccttgttgttggccggttgcctgttggcgttgagtgttgaggcgatggccgatggcgctcatacctatgcgttcggcgaggcggcgccggcgagcaaagccacgcgtactgtggaagtgaccctgcaggacatttccttttcgcccaagtccctggatgtcaaagccggtgagacggtgcgctttgtactggtcaacaaagggcagttgctccacgaattcaacctgggcgacgcggcgatgcatgccgagcaccagaaggaaatgctacagatgcaggccagcggcatgctcacctctaccggcatgggcaatatggaccacaacgccatgggccatggtgcgatgaaacacgacgatcccaatagcgtattggtcgagccgggtaaaactgcggagctgacctggacgttcaccaaggccacaggcctggagtttgcctgcaacctgccggggcattaccaggcgggcatggtcggcaagctcaacgtcgattgatccgctggcgcttaggcgcgggggcaaaggctggtagactggcgtggtttatttagccaggtttccgccatgcatcccgcagccgaacattcgccgctgggcaagtccagtgaatacatctccacctacaccccgtctttgctgttcccgatcccgcgtgccgccaaatgggccgagctgggcctgagcgccgagaccctgccgtacaagggcgtggatttctggaactgcttcgaattgtcctggctgctgccgtcgggcaagccggtggtggccatcggcgaattcagcatcccggccgactcgccgaacatcatcgagtcaaagtcgttcaagctgtacctcaactcgctgaaccagaccgcgtttgccgatgcggccagcctggaagccaccctgcgcaccgacctcagcgccgctgccggtaaaccggtgagcgtacgcatccgcagcctggccgagatcgaggccgagggcgtgatggccttgcccggtgtgtgcatcgatgacctggatatccgcgtcagcaactacgaacacccgcgcccggaactgctgcgttgcgatgattcgcgcgttgtcgaagaaagcgtgcacagccacctgctcaaatccaactgcccggtcaccagccagcccgactggggcagcgtggtggtggagtaccgtggtcacgcgttggaccacgccagcctgctcgagtacatcgtgagctttcgccagcactctgacttccatgagcaatgcgtggagcgcatcttcctggacttgcagcgcctgctgaagccggaaaaattgacggtgtatgcgcgctatgtgcgacggggtgggttggatatcaacccgtatcgcagtactgaggatgtggcgttccagaacgttcgcctggcccgtcagtaggcttattgcaagataaatgtgggagggtgcttgcccctcccacatgtcgggcagattagatccccatgctgcccagcgtattcatgatattgcgcaaggtgccggaaatcaccgggtgctcggcgtcgaactcgatggccgcttgattcacatcgtcggaaatgctgggtgtctgggtggccggttccagttcaagttgcaattcaaacttggcaatcaaggcttccagcgctgtgcgcttttcttccgacagcggcggttcctgttccaactgcccgcgcaggatctcgacctgttcttccagttttttgcgatcaggcatgacgtgtttccttttatcgataggcactggcatagaccacggcacgccgcgaaaggtctacgggctgacctgtagattaatccaccggcgccctcagtgcatgatctctatcagggcttctcgcctttgaggcgccgtaagctgatatctgccaggcaggtgcccaattcaccgaggtgatcgatcaccgagtgcacacccaacccatacaacgccacggtggccttgccacgtttgtgctcgcgttgctgctcggtcagtgcttgccactgctcgggggccagcccgcacagcgagccgcacgaagccaggccgatggtccacaagccggcattcaggcctgactgcaacagacgcggctcgccgctgaccaatacacagccttccaggcgttcgatgttcaattccatcagggcttgccagcacgcgtgcggggcgggccagcgaatggaggagggtgatgtcgccttgacccagttgggtagcgtggcggccagcggtgtggtgacagcgggggggagttcatccagccaggcgcagggcacgccttgttccttgaggctgcgcaggattttcagcgcgccggtagtggcttgggagtcgggtgcgggggaatcggtgcgtgccctggaaccgaaatccaccaagcagccactcaggccaaacagaacggcagtcaaggcgggggtgctggcgatggctatctcggcgtgaggcatgtcgacatccctgaaatagcgctaacgctatccaggcaccatgacaggccgatgacagccgggataattgtaggaattttgtccatttttggtctgacgtttcctagttactgcctaattggcgacttccgtcatatactgacgtccttattcagggcatagcgcccatgacagaccattcaaggagcaaaagctatgcgctggagccactacttcgctcagctgtcagtgtgtgccactgtcctgctggcgccgttcgccgcacaggcagcatcggaagacgatccatgggaaagcgtcaaccgtccgatcttcactttcaacgacaccgttgacacttacgcgctcaagccattggcccagggttaccagttcgtgactccgcaattcgtccaggatggcgttcacaacttcttccgcaacatcggcgatgtcggcaacctggccaacaacgtgctgcagctcaagccccaaaaggccggtgtagatacggcccgtttgctggtcaacaccaccttcggcgtgttgggcttcatcgatgtaggcaccaaaatggggctgcaacgcagtgatgaagacttcggccagaccctcggttactggggtgtcggcagcggcccttacgtaatgctgccgctgctgggcccgagcaccttgcgtgacgcgccgtccaagtacgtggacagctacacccagccttaccgctacatgaacgatatcggctggcgcaacagcaccttcggcctgaatatcgttgatacccgtgccagcctgctcgacagcgagaagctgatcaccggtgacaagtacacctttattcgtaatgcgtacctgcagaaccgcgagttcaaggtcaaggacggcaaggtcgtcgacgacttttaagccgtgatgttttgaaatgaaaaaggcgacccatgtggtcgccttttttgtgcgcggttttcagcgcattttcaggatcctgagacccaggtgctggtcttcgccggtggttttggtccacaccacctcggtgtccgcctccaggcccttcagcgcggcgtgctccgagtcgatgcgtacggtcaacaggtcgcccgtgttgaactggcgcggcgcctgcacctgcatgccagagctggaaaggtccacgcaaaccccggcaatctcttgccctgcatggatcagagacacatcggcatccacacgcatgcggatgaaatcgcgtttttcggcgtagtcgcgctcgtgttcgctcatgggctccatccttactttgtgttgtggtcgtgcctgttcttataactcccggtgatttgcggtgtaaagacgcccggcgaccatcggcatgagcttgaaacccctgacggatgggagtaccgtctgcgccttagaagggcacctctgctttacctttgtgcatgggaaaaatcccaatgctttgtaggacagagaggctagaaagcgaatccagtacgtgagcccggccattgtcgcgccacctacgccaacctaattctggcgccgtttgcccacatgcaaaaaaccagtgccacgctgctgataatcgatgacgacgaagtagtgcgcgcgagcctcgcggcctatttggaagacagtgggttcagcgtcctgcaggccagcaatggccaacagggtctccaggtgttcgagcgcgaccagcccgacctcgtgatctgcgacttgcgcatgcctcagatgggcggcctggagctgattcgacaggtgaccgagctcgccccgcagacgccagtgattgtcgtatccggcgccggcgtgatgaacgatgccgtcgaggcgttgcgcctgggcgctgccgattacctgatcaagcccctggaagacctggccgtgctggagcactcggtgcgccgtgcgctggaccgggctcgcctgctgctggaaaaccagcgctaccgcgaaaagctcgaaaccgccaaccgcgaacttgaagccagcctcaacctgctccaggaagaccagaatgccggtcgccaggtacagatgaacatgctgccggtcagcccgtggaccatcgacgaattccagttcgcccaccagatcatcccgtcgctgtacctgtcgggtgatttcgtcgactattttcgcgtcgacgagcggcgtgttgcattctatctggccgatgtgtccggccacggtgcttcctcggcttttgtcaccgtgttgttgaagttcatgaccacacggttgctgttcgaatccaagcgcaatggcaccttgcccgagttcaccccctccgaggtgctgggccacatcaaccggggcctgatcagctgcaagctgggcaagcacgtgacgatggtcggcggcgtgatcgatgaagaaaccggtcttttgacctacagtatcggcggtcacctgccgatgcctgttttatacactcctgacagtgtgcgttacctggaagggcgtggtctgccggtgggcttgttcaatgaagccacctacgaagaccacatcctggaactgccgccgaccttcagcctgacgctgatgtccgacggcattctggacctgcttccagagcctacactcaaagagaaagaagccgccttgccccaaaaggtcaagtcggcgggcggcagcctggatggcctgcggcaggtttttggattggccacgctaggggagatgccggatgatatcgccctattggtgttgagcaggaatctttgatgagtaccggaagaatccaattcgccgagcaagacgggaccttcgtcctgaagtttgtcggtgaagtgcgcctgaccttgtgttcggcgctggatgcgacgattgagcggatcttcacagcgctgaacttctcggcgatcgtgatcgatctgaccgaaacccgcagcatcgatagcaccaccttgggcctgttggccaagttgtccattctgtctcggcagaaggtcggcctgttgccgaccgtcgtcaccacccacgaagacatcacccgcctgttgcagtccatgggctttgatcaggtgttcaacatcgttgaccgcccaatcccatgcccggaatgcctgaccgacctgccgtcccaggaccagtccgaggaagtcgtgcgggtcaaggtgctggaagcgcacaagatcctgatgggcttgaacgattccaaccgcgaagcctttcacgacctcgtcaacgccctcgagcgccactgaccgcattccaactgtgggagggggcttgcccccgattgctgagggtcaatcacaacatctgtgcctgacacactgctatcgggggcaagccccctcccacattgaatctagataggcttcagatctactgagcgtaaaaaagggcggcacccgcgagggtgccgccctttttgtcgccgtctgccttacaacttggcagtcagcaacgcctccagcttctcctggtcccgagcaaactgacgaatcccctccgccagcttctcagtcgccatcgcatcctcgttggactcccaacggaactgcgcttcagtcagatgcacgcgcgcttcaccggcatgcccaggcgataacttgcgctccagcttgccttcatccgccgccagcttctccagcaggtccgggctgatggtcaggcgatcacagcctgccagctcttcgatctggctcaggttacggaagctcgcacccatcaccacggtcttgtagccgttggccttgtagtagttgtagatgcgggtcaccgactgcacgcccggatcttcggcaccggtgtagtcgttgccgttggccttcttgtaccaatcatagatacggcccacgaacggcgaaatcaggaacaccccggcttcggcacaggctacggcctgggcgaaggagaacagcagcgtcaggttggtctggatgccttctttttccagcttctccgccgcgcggatgccttcccaggtggaggcgatcttgatcagcacacggtcacggccaacgccggccttctcgtacaggtcgatcaggcgatgcgcacgcttgagaatggcggcttcatcgaacgacagacgggcgtccacctcagtggaaatacgacccggcaccactttgagaatctcttgacccaccgccaccgcaaaacggtcgctggccaggcccacatcgccattgcagtcctgtacggcttcatccagcagcttggcataagccgggatcgacgccgccttgagcagcagggaagggttggtggtggcatcctgcggcttgagcttggcgagggtggaaaaatcgccggtatcggctacaacagtggtgaattgcttgagttgttccagcttggaagtcatgggcgtgctctgtcctgtgggtctgatgacattacccgagcaccggcaggcgctcaagggcgcaaatgcgttcgatcgtttgcgagggcaacaacctgaaaacggccgtttgaatgccttgtcttggtgctaaataggaggccaaaaccgccggcaggttcaactcaattaccgaacgaccaccacaattcaaaggtgggaggggcttgcccccgatagcgacagaccagtctccccggacccgaactggccctcaccgcccttccagcaaagccccagcctgatccagcaacgccaacggatcactcgccttatgaatatccaccgacaacaactgcctgaacttgcgcgcccccggaaaaccagtgcccaaccccagaatatgccgagtgatatggtgcatcgaaccaccactggccaaatgctccgcaatatacggccgcaactgcaccagcgcctcagcccgactgatcaccggcgcctcactgccaaacaactgctgatccacctccgccagcagatacggattgtgataagcctcccgacccagcatcaccccatcaaacacctgcaaatgcgcctggcactgctccagcgtcttgattccgccgttgagcacaatctccagctccggaaagtcctgcttcaactgcgccgccacgtcataacgcaacggcggaatgtcacggttctccttcggcgacaacccttccagaatcgcaatccgcgcatgcacggtaaaactggtgcaccccgcgtccttcaccgtcccgacgaaatcacacagctcggcgtagctgtcccggccattgataccgatgcggtgcttcaccgtcaccggaatcgacaccgcgtcacgcatcgccttcacacaatcggcaaccagggcaggatgagccatcaggatcgcgccgatcatattgttctgcacccggtcgctggggcagccgacgttcaggttcacctcgtcgtagccggcggtttcggccatacgcgcgcaagccgccaaatcagccggaacactaccgcccaactgaagggccagcgggtgctcggcttcattgtggcgcaggaaacggtcgtggtcgccgtgcaggatcgcgccggtggtgaccatctcggtgtagagcagcgcgtgcttggagagcaggcgcaggaagtagcggcagtggcggtcggtccaatccatcatcggggcgacggagaagcggcgggagagggcttgcgatggagctatgactgaaggcattggagtcttggatggagaatgcgaaggacgggcagtttatcaggaatgggtcggagggggctgggtgttgatcgtcgtgtcgcgagaaccaatattgaataaatccgtcccttttttcccataggagggataggcgtaataggtgattgcatattgagatcacgggctaaaaagagtaggttgctttgcaacgctgaagcttcttaacgttgttgaaggactgtattgtgaaaggaatcaagccgtttttagtgttgcgatactcgctgatcgaaaataagcaaggtgcccttgttccttccccgttacctaaacctaagggcgcggttgttgtagcggccctccaggatgacggtcgtgagtttgttaaaaacaaagttcgttatagttttgtggggttctcgtatgctgaacccaccgctaacgaatttcctaaagacaggtttttggtgggaaagactgctaagcataagttaactaaagttggtgataaggttcctggtgatatagttgcccacgacgctgatgattgggttccagtcattactgtggttgatactgtggatcagtatatttttgtgcagcatgattggcgatttggtacggatgaacaaattgcaaacgcaattcaagcagggcttagggatcctgtcttgaatgagtttaattattcaatatttattgagcctaagactattaggggtgaattttggaatgttgttaggtctcatagaaagatttttgaaattgagcttgaactcatctctccaaatattttagaaactaacataaaggctcgtgatgctctgagggcaatgaaggagctcttcggtcaggatgaggtgaagatcttactgagcaatgagtttggagatctcaaagttccggcttcccctgtagaagactatattgattatattgaggaaggggaaggtaaatggagtgtaacaactgagggcgattacaacggtaagcaagtacataaaagtacatctgccattgtgaaaattgatttaaatgtgccttctgatgatgtggtaatgcaagagaatcaattggaacttgaaactgggcagccggccccaggtcgttctcttcacgatgctcgaatggtggctgaagtgtattctgctataggtgatttgttgaggcgttagcatgattcgcctaatatttattttcattgcatctttcaccctttgttacctgtcgctatgggggacggggggagcggtgagcccactattcagtaatgtaaattcggttttgttcgttttaggcgcgctgtttggtgctctttcgttagctttctttaactatgttgagggtgttatgaaagatgttccgaaaaaattgaagcagcaaaaacctacagcttatgcaatagttgttgatactttgacgaatttgaagcgtgaggttatcgttaatgtcgttttggtagttatttttttaatggttgcattcgtattgggtgcaatgattgaaatggcatttatgcaaatgttagagatgtcaaagttttgggtgtggtcagtcttgtcggttcgcggagcttgtctttttagtgttctagtggtggtgtttgtccagttgtcggggttcgtgacagcgaacaatttacgggctgaaatttccatgtatggtgagtaacgtcttgtggtttttcacagtcttaaaatcgcgggtcttatgctaaatctcgcgcgctgctcaccctattagtcgactttgctcccgggtagatttttcacgctgatagtcgatgatagtgcgcacaccacaatatcctgttcgcagtccactatgtttttaaggagttttcccacacttatctcggcttgcccctcagaccacccatcgctaacctccgcaagtcgctgcaaacccagcgaccggaggtggaagtccgtattgctaaggcgttttaactcccggaaatatttggagcttcgcccatgcctaacaaatcacgcagtccttatgtcggtcaagacagtgctcccgccgaaaacccagccggcaacttgttcctcgtcagccccaacatcgacaccgaaaccctcctggccaacgccgccgaaaacctcgcatccgcgaaccaaatggccgccaatctggccttcgacctcgatgacccgcaccgcgccatcgtcctgggcctccaacaactcatcgatctaagtgctctactcatcgaccgagtccaggaacacgtcgcacctgccgcctgtaaggccaccgcctgacacccaaccccgccgccttaccccaaggcggcaacctgaacccatcctgtcacccagcaaagtttcatcatccccggcgcttttgaggtctacgatcctcttcaagagaggacctccgcgcctccattccacagggaactgaaaccatgatctcgaacctcgttaaagtcgtgatggttgctggcacgttgctgttgggcgcttgttcgacagggtcggccggcgtgagcagtgacccgtgtttttcaggcggatgccaggcgtttggggaccatagccccagcaaagccgccaagatgaattttggcggcagtgggctggggagtagttatggggagtatgggtcagggttgttgcatgatgattgatggggtggtggggcagtcattgggggggtgactgacccattgccatcgggggcaagccccctcccacattggagctgtgatcggcgcaaaaccgggggcgtcagtgcccccccttcatgcggcgggcgatgaggtagatgcccaggccgatcagcgctgtagcggcgccgatatagccggtgctggtccagccgtacccggctgtaatcgccatcccgcctagccacggccccagcgcgttcgccaggttgaacgccgcgtggttcgacgccgccgccaggctcggggcttcgtgggcgatgtccatcaagcggatttgcaggggggccgccatggcgatcatggtgccgaccaggccaatgcccagcagtacgctccacagcgaactggcggcgaaggtgaagaagatcagcacggccatcgaccacaccatgatccagcccacggcgcgaaattgcaggcggtcgaacaacttgccgccggcgatgttgccgatgatgccgcctgccccaaacgcggcgaggccgaagggaatccactgcggcgagactttggtcacttccagcatggtcggcgccaaatagctgaacacgcagaacatcccggcaaacccgatcgcgccaatcgacaacgccatccacacctgcggcttagtgaaggcgcgcagttccttgcgcgggtcgctgcgttgttcgtcatggcggtggggcacgaattgccagaccagtgcgatggtgcacagggcaatcacgctgaccagtgcaaacgccgagcgccagcctaggtgttggccgaggaaggtggcgatggggttgccgagcagcatggccagggtcaggcccatcattacgcgggccacggcgccggcgcgtttgtcgttggggaccatgctcgaggcgaccacggcggcgatgccgaagtaggcgccgtggggcaggccgctgataaagcggaaggccaccagcgagccgaaggtcggggtgaaggcggtggccaggttgcccaaggcgtacaggcccatcagtagcaacagcatgtgtttgcgtagtagcttggcgccaagaatggccagcagtggcgcgccaaccatcacgcccagggcgtaggcgctgatggcgtggccgacttgcggttcgctcaaattgagattgtgggcgatgtcgggcatcaagcccatgatggcgaattcgccggtgccgatcgcgaaggcgcccacggccatggccgcttccattttggcggcgccgcgcgcgggcagcacatgcccgggtgtttgctggatagtcatgggtaactctggttggatggagcgcacgaaggagagccgccgatgctacgcaagcagcggcaaaggtgtctagaacagcggtttgcgtgagagttccaggcctgtgaccccaggtcgcgcctgccacgcttgacatcgacgggttaaaagctgcgatttagagctgtcaattggccaaacggcgcataaacgccgtttgccgtgatattctgcgcgccgtcctggtctagcatcccctgggtacgtacgtcccagcggttggctgtcgcccaggtagctgaagccaataatgataagaagtcagcgcagaagggacataaacagtgaggtcgatacgtcggccttgtgtgcccaccctgcggccctctcgtgaatgtgcataccccgcggtgctgccttgcgcagctgtgatggagggttgcccatgatcaggggcggtagggcggatggcgttttatcataggtgctactgatgtttaaaaaagtaaacactgccctgctggggctggctttgtcgctggggatcagctccgttcaggcggaagaggcaaagaaagtcgatgtgctgctgattggcggcggcatcatgagtgcaaccctgggtgtctggctcaatgagctggagccgggctggtcgatggagatggtcgagcgcctggatggcgtggccgaagaaagctccaacggctggaacaacgccggtaccggtcactcggccctggctgagctgaactacaccccggaagacaagaacggcaacgttgagatcccgaaagcggtcgagatcaacgaagcgttccagatttcccgtcagttctggtcctggcaggtccgccagggcgtgctgaaggacccgcgttcgttcatcaacaccacaccgcacatgagctttgtgtggggcgatgacaacatcaagttcctgaaaaaacgctacgaagccctgaaggccagcccgctgttcgccggcatgcagtactccgaagacccggcgcagatcgccaagtgggttccgctgatgatggaagggcgtgacccgaaccagaaaatcgcggccacctggagcccgctgggtaccgacatgaacttcggcgagatcacccgccagttcgtcgctcacctgcaaaccacgcctaagttcgacctgaaactgtcgagcgaagtgcaggacatcaccaagaacgccgacggttcgtggcgtgtgagctacaaaaacctgaaagacggcaccaagaccgaaaccgacgccaagttcgtgttcatcggcgccggtggcggtgcactgcacctgctgcagaagtcgggcattcctgaagccaaggaatacgctggcttcccagtgggcggctcgttcctggtgaccgataacccaaccgttgccgagcaacacctggccaaggcctacggcaaggcttcggttggcgcgccaccgatgtcggttccgcacctggacacccgcgtgctggatggcaagcgcgtgatcctgtttggcccattcgcgaccttctcgaccaagttcctgaaagaaggctcgtacctggacctgctgaccagcaccaccacccacaacatctggccaatgaccaaagtcggtattcgtgaatacccactggtcgagtacctcgccggccaactgatgctgtccgatgacgaccgcttcaaggcgctgcaagagtacttcccgaacgccaagcaatccgactggcgcctgtggcaagccggccagcgcgtgcagatcatcaagcgtgacgaagagcagggcggcgtcctgaaactcggcaccgaagtggtcagctccgccgacaacaccatcgcgggcctgttgggtgcatcgccaggcgcgtccaccgcggctccgatcatgctgaccgtgctgcagaaagtgttcaaggacaaggtcgcgactcctgagtggcaggccaaactgcaccagatcgtaccgagctacggcaccaagctgaacgacagcccggaagcggttgccaaggaatgggcctacaccgccgaagtcctgcaactgcctacgccgcctgtgattccacaaatggctgccccaaaggctaccgaggctgccaagcctgcggctgagccaagcaagccggcatctgacctggcgctgtaagccaggctgatgcacaaaagcccgctgaaccggtaacggtcagcgggctttttcatggccgtgagaacagttcagcaacctgacagacgccacctgttaaaaatattccagagccaagcaggagcgaggccgcaacaagggggcattttttaccagtgtcagtgttgggcgcacgcgcccgagggttttttgtatgtggctacgttatgcagcattggcggccatggtcgtcgcggcatccggatgtgtgcaagagcgcgtcgtgcacgagcgcaggccggtgcaacgtgagtatgtggaagtcatcgcgccacaaccgccgccggtgcaggtgatcgaagtcgagccgcccgtgcgctacggctacgtctggtcgcgtggttactggcgctgggacggcgggcgatatgtggctgtacacggccactgggagcctgtacgtgaaggctatcgctatgtgcatccacattgggtgcagcgcaatgatgggtatcactggcagggcggtggctgggttcgctgagccctggtttcatcggcaacgagcgttaaatcggcttctgggtgcccaggagccgaacctcccgcagcaacgcggcgccgagttgatcggtgcccagttcccggtagcccacggcctttacctcgccgttctcctccgcctggataaggatcaccggggtttccttgccggtggtttcgtcgacatgcatcgcgtattgggggatatccagcttgatcggcgtccccgccgccttgcccttcacattgatcaggaaggcggcgcaaccgctgtcgacatccgcagtggtggcggagcggccgctgacaaagcaggtctttggtagatcgggccaggtgatggtgtcggccagggcgagagtgggggccatggccagggcggcgagtagaagcgtgcgcacgtcggtctttctctcgatcaaggtgaaaacggtttgtaccaaagcccgcccgcggccgcaacgccagggttcaggccagccgcttcatgccggtggtcttgatcgcgttgaggtcgaaggttgccgtgtattcgcaaccggcggcgtgggcgcagcgctcgatcaggcagtctgcaaagtcagccttgttcgccacaaacttgcgcagcgcctgccagatgatctccccatgctctacggtcaattcgcgggtgcgcagcagggtctcaagcactatcaccacatcacttttggccgactggtagcagctttgcagtacccacaccagctccacaatggagaccaggctgataaagcccggcgaggcggtggtcagtgattcgatcagctcggatgccttggccgattgcacgggatcatcctgggtgacgtagcgcaccagcacattggtatccagcccgatcatccggcttttgccccctgcgctgcgatggcttggttcatctcttcgatagagatggtcctggcaggcttgcggatcaaccctttgaggtcatgcaccgttttgctcgcggcaatgatggaaaactgcccatcttccatttctacgaattcaactcgatcacctgtttccaggccgagggcggtcctgacctggacaggaatggtgatttgacctttcgaggtcagtgtagcgatagccatgttgaagatctccatcgtgatattccttaccttagggtaaggaatgacagaggacaatatccgttggtccatagggtgctcatctggtgtgggttagtcggaacaggtaaaacactagtcccaactgcccacgcccgctgggcctaaagagatacaaaccatgaccgaccgccacctcgttatccctgcctccatgcaccccatcgtcgagcgcgccggctacgtgcctgcggtcaaggttggcaagacgttgtactgcgccgggcaggtcgggcgtacggctgggttggcggtgatcgaggaccccgcggcgcaattcgtcgcggcctgggacaatctgcggcaggtgctggaagagggcggttgcacgttcgacgatgtggtggacatgaccacttatcatgtggatatgagccagcacatggcggttttccgtgaagtgaaaaaccgcctgtttccacgtgggcattgcgcctggaccacaatcggggtgtccgaactggcgcaccccggcctgctggtggaaatcaaatgtgtggcggtacagcgctagcttattgcaccacgcggtagcacggtacatacgccgcgccgcccggcaacttcatgcggtgctgggcgacgaaggcctgtagcaactcgtccagcggtttcatgatggccgggtcgccgtggatctcatacgggccgttctgctcgatcaggcggatgcccttgtccttcacgttacccgccacgatccccgagaacgcgcggcgcaggttggcggcgagttcatggggcggcagggcgtggctcaattgcaggctggccatgttctcgtgggtggggtcgaacgggcgctggaagccttcgtcgatcttcaacagccagttgaaatggaacgcgtcgttgcgctcgcggcggaaatgcttcaccgccttgaggccggcagtcatctggcgtgccacttccgccgggtcatcaatgatgatctggtagtgcgcctgggccgcttcgcccaaggtggcgccgacgaaggcatgcagttgttgcaggtacggcgcggcgtgtttcggcccggtgaggatgaccgggaacggcaggtcacggttgtccgggtgcatcaggatgcccagcaggtacaggaattcctctgctgtaccggcaccacccgggaagatgatgatgccgtggccgacgcgcacgaacgcttccaggcgcttctcgatgtccggcaaaatcaccagttcgttgacgatggggttcggcgcctcggccgcgatgatgcccggctcggtgaggcccaggtagcgcccgccggtaatccgctgcttggcgtgggaaatggtcgcgcctttcatcggacctttcatcacgccagggccgcaaccggtgcacacgtcaaggctgcgcaggcccagctcgtggccgaccttcttggtgtatttgtattcttcggtattgatcgagtgcccgccccagcacaccacgatcttcggttcgacacccgggcgcagcgtacgggcgttgcgcagcaggtggaacacgtagtcggtaatgccctgggagttgctcaggtcgatgcgctggctgtccagctcgttctcggtgtagacgatgtcgcgcagggcgctgaacagcatctcgcgggtgctggcgatcatttcgccatcgacgaaggcgtcggccggagcgttcagcagttcaaggcgcacgccgcggtcctgttggtggatgcgcacttcaaaatctttgtaggcgtcgaggatggtcttggcgttgtcgatgtgcgcgccggtgttgaggatcgccagggcgcattggcggaacagggtgtagatgctgccggtgccggcttcgctcagttgctggacttcacgttgagacagggtttcgaggctgcccttggggctgacggaggcattgatgacttgacgttggggcattctgattccttgaaagcgcagccaccgcacccgcaaggggccgcgatggcttgagaatgatgggcgccgaattcggtcgcacgagacggttatttacctcacgcgcaaggtcgagcgcaaataccgtccagcaccatcatgccgcagaactcactgaatcagcttccagtttttgtagaaaacccgacgcagggtaaaggccatcccggcaaacccagcgatcacggcattgagcacccgggggatcggcgtcggtcgcacgatatcgataaacaggcagtaacgcttggcgtcgtttttgttgaaagacgcatgcatcaaggtgtcatcgaaaataaacagcgggtcgtcgtgccagtaatgcttgtgctggcccacctggatgtagacgccctcgtgatgcggtgccggggccatgttgtagagcacgcggaacatcatgcgcagcgggccgaagtgaaaggaggtcgagcggttttcattgaacaccgacacaccgatggtcttcacgaacggcagtttttcgcgcagtttcggaatgtccagggtggtctcgatggcttggccgtaccactggaagaacaacatgccgcgtttcttctcggccatgcgctcatccaggtagccgatgatttcgtccttgtgggccatggcatcgttgatcacctgttgcaggtcttcacgccaggcgggtggcaggtcggccatggtgtagacgtggcggttaggcgaactcaacaggtcgaacaaggtgttgaacggggccagcagccaagtgttacggccactgccgataaaatactttttgatcgtcgtgcggtcgtacagcccgttgcgcaaaaagtcatagacaccacacaccagcaccaggcccaggaacaccagggtggtgaccgggaagcaataaataaccagcagcacgccgatgatccaggcggccgagactattttcttgcggttgacactcgcactcatgaaactcaactccaacgggggaaggtgcacgagttccagtcctcatggcacccagagatgcgaagacatgaaacataatgaaacaatctccctatgatagggctttcccccgcagccgggcgttttaaatattgcgaaattgtgaaggctttacacagtttttaaccccggcggcgctgtgtggattggattttgtaaacagaagatttgcgactatcgtgacgcttcggttttttggacgtcatagaccggtacgattgaagttgaatggccaccactggccttcggcaccttggaagaggcagaaattttatgatcatcaaaccgcgggttcgtggcttcatctgtgtgaccgctcaccctgttggctgtgaagcgaacgtcaaggaacagatcgactacgtgacccaacacggcgtcatcgaaggcggcccgaaaaaggtgctggtcctcggtgcttccaccggctacggcctggccgcgcgcatcagtgccgcgtttggttgtggcgccgacaccctgggcgtgttttttgagaaagaaggcgaagaaggcaagctgagctccgccggctggtacaacagcgccgcgttcgagaagtttgccgtcgaaaaaggcctgtacgccaagagcatcaacggcgacgcgttctccgacgagatcaagcgcctgaccatcgacaccatcaagaaagacctcggcaagatcgacctggtcgtctacagcctggccgcgcctcgccgtaccgacccgcaaggcgtggtgcacaactccaccctcaagccgatcggcaaggccgtgaccctgcgcggcatcaacaccgacaaaggcgttgtggtcgacaccaccctggagccagcgacccaggaagaaatcgacggcaccgtcaaagtaatgggtggcgaagattggcagctgtggattgacgccctgcgtgacgccgacgtcctggccgaaggcgccaagaccactgcgttcacctaccttggcgagaagctgacccaggacatctactggaacggctccatcggcgaagccaagaaagacctcgacaagaaagtcctgaccctgcgcgacaacctcgccgcgctcaagggcgacgcccgtgtgtcggtgctcaaggccgtggtcacccaggccagctccgcgatcccgatcatgccgctgtacctgtcgctgctgttcaaagtgatgaaagagcagggcacccacgaaggttgcatcgagcaggtctacggcctgttcaaggacagcctgtacggcagccagcctaaactcgacgccgacggccgcctgcgtgccgacctggccgagctggaaccgaaagtccaggacgccgtggcggccctgtggaaccaggtcaccgacgacaacgtcaacgaaatcagcgattttgccggctacaaggcggagttcctgcgtttgttcggctttgaaatcgacggcgtggactacgaggctgacgtgaatccgaccgtgaagatcaacggcctgattcaggcgtaagtgatccggttcaaaaagacggcccttcggggccgttttttatggccgctgaaaaaggctgccttcagaaccctcttacacatttttgagcagcgtccgatcgctccgatatgccagactccagccgctatcacattcaggctaacggaggatctgatgacgattcgtgcagtggtttttgatttcggcggtgtcctgttcgactggagcccgcagcacctgtaccgcaagctgattgccgacgagcatgagcggcaatggttcctcgataacatctgcacccaggcctggaacaccgagcaggacgccggtcgctccctggccgatggcacccgcagcctgatcgagcaatacccgcatcatgagcgtttgattcaagcctattacgaccgttggcacgagatgctgcgagggccgttgccggaaggtgtggcgatcctcgaagcgttgcaccgagccaatatgccgttgttcgggcttaccaactggtctgccgagacgttcccctatgcgcgggccaattacccgttcctgcagtgttttcgcgacatcgtggtatccggcgagttgaagctgatcaagcctgacgcggcgatctatcacgccagcctcagccaggtacgtgcgcagttgccggatatccagccggctgaagtggtgtttatcgatgacgttgccggcaatatcgaagcggccatcgcactgggctggcaggggattcaccatgtgtctgccgagcgcacggccgcgcagttgcgtgagttgggcgtgggcttctagcgcgcccacttttccatggcgaaatccacgaaggcgcgcagcttgggcaggcgatatcggtcctggccgtagagcagatgcatggggcggctgggcagtcgataggtggtcaacaaggccaccagtttgccgctctccaggtccggttgtaccagggcatcggccagcatgatgatgcccatgccgttgacgcccgcctggcgcaagccttgcgagctgttgatggtcaatgagccggacactggcacttccacctcgccgctatcgtcggtcatgcgccagagtttttcggtgtcgcgccaattgtcatttgccgggtaggcgaacgccaggcagtcatgttgcttgaggtcctcgggtttcgaaggcgtgccgtgtcgtgccaggtacgcaggtgacgcgcagagggtgagggtgtagtcctgcattggccgagcaatcaggctcgatgcttccagttcgcccagacgtatcgccacgtcgaagccgctgtcgaccaagtccatccgctcgttgctcagcaccacgtacaggttgatcagcgggtagcgccgggaaaactcgctcaaggccggtgtaaggcgttcggtgccgaatacggggggcgcagtgatgcgcagggtgcccttggggacatcactatgggcttgttcggccagttgctcggagtcggccaccagccccaatacttccaggcagcgctggtaatactgcccaccaaattccgtgaggctctgtttgcgcgtggtgcgcttgagcaggctgacgcccaggcgttgttccagcgcgcgcaggtggttgccgaccatggtggtcgacatcccgcaggcctgggctgcggcggtcatgctgccagtctcgaccacttttacgtacaccgacattgcctggaacagatccattatcaagtcctgatttaaagtcattgcaggaatgtgcagtttatccagctcaggtggctaacgatactgaagccatcccaacgatgcactggagcccgcaccatgaccgccgcctgcctgatgaccacttaccaacccctggcgctgagctttacccgcggcctgggcacgcggctgtgggaccagcagggccgcgaatacctggacgctgtggcgggtgtggcggtgaccaatgtcggccactcgcaccccaggttagtgacggccatcagtgaacaggccgggctgttgctgcacacctccaacctctacagcatcgactggcaacaacggctggcccagcgcctggcccaactgtctggcctggaccaggccttcttcaacaactcaggggccgaagccaatgaaacagcgctgaaactggcgcggctgcatggctggaaaaagggcattgaagagccgttggtggtggtgatggaaaacgcttttcatggccgtacgctcggcaccatggctgccagtgatgggccttcggtacgcctgggtttccagcggttgccgggggactttctcaaggtgggctttggcgatctggctgcgcttgaagccatcacccagacgtttggcgcgcgtatcgccgcggtgctgctggaaccgatccagggtgaaagcggcgtactgccggcaccgccgggctacctgaaagccctgcgtgatcactgcacccgccatggctggttgatgatgctcgatgaaatccagaccggcattggccgcaccggcgcctggtttgctttccagcatgaaggcatcgtcccggatgtgatgaccctggccaagggcctcggcaacggcgtacccatcggcgcctgcctggcgcgggctggtgtggccgagctgttcacgccgggcagtcacggcagcaccttcggcggcaacccgttggcctgtcgggtcggctgcaccgtgctggacatcatcgaagaacaaggcttgctgcagaacgcggcgcaacagggcgagcgcctgctggcgcggttgcgggtggaattggctgagcacccgcacgtcctggcgattcgtgggcaggggttgatgatcgggatcgagctcgcgagcccttatcgtgacctggcccagcgcgcggcccaggaacacggcctgttgatcaacgtgacgcggggcaaggtcattcggctgctgccgccgctgaccctggatgccaaggaggttgagatgatcgtgcgggccattacccggttactggatcaggcccattgagccattcctggttcagggtttcggtatcgcccaggtactccaacaaccaggccatggccggggacagcttgtcctgtgcccaggccacacacgacgggctggccggaaacggccggctcaattgcagcgccaccaactccccgcgttcgatccatggcaacacctgatgcgccggggccatgccgacacacaggccatcacgcaggcaatcgagggccgaggaccaattcggcactaccagccgtcgctggttatccagggtccaggtgtcgcgcttgggcaggttgcgtgatgtgtcggtcatgcacaacgaggcgaagggccgcagttgatcgtcactcagcaagccttcgacgctggccaacgggtggcgcgcgctgaccacacacagccagttcaacaagcccatgtcgcgaaaggtaaagcggctggccaccggcaccgcgctggtggcgccgatcacaatgtcggtgcgctcatccgccagggcatcccacacgccgttgtacacctcgtactccagcaacagctcgacttcaggaaattgccgatagaaatcaatgaccaactgccggcagcgctggggtttgacgatggaatccaccgccaccttcaactggccactccagccgttggccacttgctggcaaaggcgtcgggtgccgagcatttttttcatcacgccacgggcttcctcgataaacagccggcccgctggcgtgagctcgacgtcccggtggcgccgcacaaacaacggcaccgccagccattcctcgatctgacgcaccgtatagctgatggccgacggcacccggtgcagttcctgggcagcggcgctgaagctgccatgacgcgctactgcgtcgacaacgtccagcgaatattcagaccacatggcggctgccttcaaatttattgataagagtgcccaattattatcgcttcacaccaaaactgtcagcttcataatgggcggcagtcagcaaatagtttgatggcaaggtcaacaaggcttcaatgaaaaattcttttggtttcactgcgtatctggcggggctgagcatgctcggttacctcgccatggacatgtatctgccggcgttcggcgccatgggcgagcaattgcagattggcgcaggcgcggtgggcgccagcttgagtatcttcctcgccggctttgcggtcgggcagttgttgtgggggccgttgtccgaccgcctggggcgcaagccgatcctgctcgccgggctgagcctgtttgtgctcggttgtgcgggcatgttctgggtcgaaacggcgccgcaactgctggcattgcgttttatccaggccattggcgtgtgcgctgccgccgtcagctggcaggcgctggtgatcgaccgctacccggccgacaaggctcaccgcgtgttcgccagcatcatgccgctgatgtcgttgtcaccggctttagcgccgctgttgggcgcgctggtgctgaatcacttcggctggcaggcgatctttggcgtattgctgggggtgtcgttgttgctgctgttgccgacgttgttcctgcgtactgcgcaaaaacgtcaggcagcgaagggtgaaccttcgcgcctgggttatgggcagttactgacgtctcgcgtgttcaccggcaatgtcatgatttttgccgcgtgctcggccagtttctttgcctggctgacggcgtcgcccttcatcctgggcggcatgggctacagcccgaatgacatcggcctgagctacgtgctgcccaccttggcgttcctggtcggcggttacagctgccgcagcgccttgcagcacttccagggcaaggcgctgttgccgtggctgctgctggcgtattgcatcagcatggtggcgttgtacttggtcgccactttgactgcgccgaccctcaccaccttgctgattccgttctgcctgatggcgctgtgcaacggtgccagttaccccatcgtcgtggcgaatgcgctgatgccgtttgcggaaaactccggcaaggcggcggcgctgcaaaatacgctgcaattgggcctgtgctttctcagcagcttgttggtgtcatcgatgatcgaccaaccgctgctgattaccgtgatcgtgatgctggcgaccgcgccgttggcggtattgggttactggctggcacggcccaaggccgatgattcggaactggcagccgcctagaacgtcacttccaggttcaccgtcggcgttgatgtgcggctgccccggccgccatccacgccgaatttgttatgccaatactcgtaacccacccccaggtacaggttcggcttcacgcttttgcccggtcgcaccgccaccatcagcgcggtgcgcatcagggcttccggcgcggtgtcgcgaccgtgatagtcctcgcctttttccccgacataattgataaaaccctggaatttcgccgcatggttggcgatctcgaacgggcgcatccatgtcagattgagcatgtaggtatcgtcgaaggtgtggttcgactcctgcgcgccggggatgccggtgtggttcctttccttgtagtacagcaggctcaggtccagcacgccgacggtgttgaacttcaaggtcgggccgatcaccagggcgcgcttcttggctgaggcgaagttgttgttgcggttggcatcgaaacccaacgtcagcgcgtaatccttgaccaggccgctgcccagcggcacatcgaacacccgcgacgcatacaactggtggcggtatacgacatacacctcactcccgccatgatccgtacccttgcgcgggtcgcggctgtcggacaggaacacatcgaggttgaggaagttgctgccataccggtagccgctggcgtgggtgaagctgtagatgcgcttgctgaattcgtcgggattgttcgggttggtgaactgctgaccgtagcgaaaccctacgctgttgttcatccattccaccgcgacggcctccccgccgccgaggagggtgagtgcgacggttgcgccctgtagtgcctttttcattgttatgggtcctttggcgttctggctcatcacggccggattgtttttgtaacgccgatggagggtaacttgttcgattgattgtatacaactctatggacatccagtccgaacattgcatacagtgaccgcacaacaaaaacagagaacccctcaccatgactatcccgaaggcgtcaccgcagcggccagaagatgagaatctcggcgtcgccgccaacatggcttacggcctgcaacatgtgctcaccatgtacggcggcatcgtcgcggtaccgttgatcgtcggccaggcggcaggtttgtcgccggcggatatcggcctgctgatcgccgcgtcgctgtttgccggtggcctggccacgctgttgcagaccctgggcctgccgtttttcggctgccagttgccgctggtgcagggcgtatcgttcgccggtgtggcgaccatggtggcgattgtcggcagtgatggcgccggcggtgtgccggcgattctcggcgcggtgatggccgcgtcgtttattggtttattgataaccccggtgttctcgcggatcaccaagtttttcccgccgctggtgacgggtattgtgatcaccaccatcggcctgaccctgatgcccgttgcggcgcgctgggccatgggcggcaatagccgcgctgcagatttcggcagcatgtccaatatcggcctggcagcgttgaccctggtactggtgttgctgctgagcaagatcggcagcgcgaccatctcacgcttgtcgatcctgctggcgatggtgatcggcaccgtgattgcggtgttcctcggcatggccgacttctccggggtgacccaggggccgatgttcggtttccccacacccttccatttcggcatgcccacctttcacgtggccgcgatcatttccatgtgcatcgtggtgatggtgaccctggtcgagacctcggcggatatcctggcggtgggtgaaatcatcgacaccaaggtcgattccaaacgcctgggcaacggcctgcgcgccgatatgctgtcgagcatggttgcgccgatcttcggttcgttcacccagagcgccttcgcccagaacgtcgggctggtggcggtgaccggggtcaagagccgcttcgtggtggccacgggcgggctgttcctggtgatcctcggcttgttgcccttcatgggccgggtcatcgcggcggtgcccacttcagtgctgggcggggccggtattgtgctgttcggtaccgtggcggccagtggtatccgcaccttgtccaaggtcgattaccgcaacaacatgaacctgatcatcgtggccacttccatcggctttggcatgatcccgattgcggcaccgagcttctacgatcacttcccgagctggttcgcgactattttccactcggggatcagctcatcggcaatcatggcgatcctgctgaacctggcgttcaaccatttcaccgccggtaactcggaccagcagtcggtatttgtggcggggaccgagcgtagcttgtgctttcgcgatgtgtcggaactgcgtgatggggattacttcaagggcggcaagttgtttgatgcgcagggcagggaaatcccgttggtggcggaagtgtcgaagaaggccgcaaagcctcaaaccactgaggtctgaatgtgggagggggcttgcccccgatagcggtgtgtcagcaaccaatcacttagctgatccaccgtcatcgggggcaagccccctcccacaattggaatgcatccagcttgagcattcagccggccttgagcactttgtattttgctgaacacacctcatccagaaacttcaccacagtccccatgcacgcctggcgttcttccacatggggcatatgactggagtcttcaaacagcgcccagcgcacatcggcgatttcatccaggaacggcttgaccaccagcggcgtggcctcgtcgtgccggcctgagatcaccagggtcggtacattgatcgccgacaggcggccagtggatttccagtctttcaagctgccgatcacatggaattcggtcgggccgctcatggcgtggtacaccgtcggatcggcatcgaccgcggcgaaggtgcgtgccacttcctcgggccacgggatgacccggcacacgtgatggtcatagaacacccgcgatgcggcgaggtattccgggtcctggtagttgccggcggtttcgtgcttgagcagggtttcatgcacgccttcaggcaataatttgcgcaggcggttggcttcgctgacccaggtgcgcatgcacgtcggcgagttggccgggatgaacgcacgcaggcccttgggttgcaggatcgcgtgttcactgccgagcatgccgccccaggactgaccgaggatcgcgtagttatcgctgatctgcaggtggtccagcaggttgttcagctcttcgagaaacaggcctacggtccagaaggatggacctttgtcgggcagatgagtggagcggccgttgcccagttggtcgtagtggatcacggcgtggccgctggcggcgacatccttgaacgcgtcaacataatcgtgggtacatccggggccgccgtggataaccaccaggggcgtgcgaccgctggagaggtcaccggtgacgcggtaccaggtttggtaggcgccaaacgccgcatacccttcgcggattttttcgatgaattccatttcgtgccctgctctgaaaaaaggatcggggacacgataatgggtgaaagaaatttaagtaactagcaaaacagctaggttttgcccggcggtcaatcgtcgagcaggcggtaatgggtggcgcgcaccaccgcttgcacgcggttcttggcccccagcttgtgcatcgccgaggccaggtgcagggtgaccaccgccagggaacggctcagttgtgtggcaatttcggccgcagtcatgccgtcggcggcccatttgaggcactcgcgttcgcgtttggtcaggtgaatgtgcgggtaagtgcgtagctctttgctgaacagcgggtaggccgcttcctgcaaggcatgggaaatcaggccgaagtccgacagggtctgctgcgcatcctgcagcacgttgcgagcactgccggtacgcagcccggtcagcgaggcaaaaccaccacggggcaggtggatcggcacgctgacgccgcaggtcaattgctggtcatgcaggtaggatgaaaccggcgcatggcagggatcgatgatcttttgcagcggggtgtcggccttgacgtcgtaggaccagacgaacggcgacacccggctcagggccagatgttgtaccgggtcaatctggtagaacccttcgctgcaccacaaggcatgccagtcgggcggggtgttgcgcagttgcagcaccgaaggggtgatcaatgcaccatcctggtcgatcggcaccggggtgtagtcgtacaccaaggcgtcgaagcccagttgctgggcgaggataaaggtgttgtccatctgctcgtccaggctcctgcccggcatcagacggtgatttaaggcagtcagcttggccagcatccgttctgctcccgaattcgtttgaatctcgacttgctgcaagtagaatgccacgccccggcgaaggactgccaggccaaacctataagaaatgctaggttatggacgcgcggcatcctcggtagtgttggcctgataaacggcccgctacctgccaggccgacactacacaaggaaagtatgcatgtggcgtgaaattgcccccgaccagcagtacaacgtgcaagtcgatggccataacctcgtggtctacagcttcggcgaaggcgatgaggtgctgctatgcctcaacggcgggccgggcctgccgtgtgactacttgcgcgacgcccatggctggctcaaggaccataacctgcgagtggttgcattcgaccagcttggcacgggcgcatcagccagacccactgatatttccctgtgggaaatccgccgttatgtcgaagaagtcgaaactgtgcgccaggccctgggcctgggccgtgtgcatttgctcgggcattcctggggcggctggctcggtatcgaatacgccatccattaccccgacgcactgaaaagcctgatcctcgaaaacaccgtcggcgacattccgcacctgtcccaggagctggagcgcctgcgcggcgccctcggcagcgaaaccgtggccatgatgcaacgccacgaggccatgggcaccctcgaccacccgcaataccaggcggcgatcaccttgctcaactaccgccacgtgtgccgcctcgatgaatggcccgagccggtcaagcgttcccttggcgactggaacatgggcccctacgaaaccatgcaggggcccaacgaattcctctacatcggtaacctcaaggactggaaccgcatccccgagatggccgaattcaagatgccgatcctgatcaccaccggccagcacgacgaactcaccccggcctgcgccatgcgcatgaaaatggcggcccgacacgccgaattgcatgtgttccccaacagcagccatatgcctttttacgaggagccccaggcgtatttcccggtgttgctggacttccttgctcgtcaccgaggctgacggatgaacctggcgcgttatcgttttgtgctgtcccggccgctgcagttgctgccggtgctgtttggcatcagcctgatcacctttgtgctggtgcgctcgatccctggcgacccggcgcgcgccttgctgggctcgcgcagcacaccggatgccttgctgaagatccgcgcccagtacggcctcgaccagccgttgtggctgcaatatttctacttcctcaagaacttgctgaagggcgacctcggccaatcgctgctgtacaaggtcgacgctctcaagctgattgtcacgcgcatcgagcccaccctggtgctggtactgggcagcgtggtgctggcgctgctgattgcggtgccgctggcgacgtgggccgcacgcaacaagggcggctgggcggacaacctgatccgcgtgttcaccacggttggcctgggcatgccggcgttctggctcggcttgatgctgatcctgttgctgagtgtgcagtggggcttgtttccggtgtccggctacggccgcacctggctggacaaggcgcatcacatggtgctgccgtgcctgacgattgccctggcgctgtcggcggtgctggtgcgcaacctgcgggcgagcatgctgatggagttgcaggccgatcacgtgaccgcggcccgcgcccgtgggctgtcggaaaccgccgtttttcgtcggcatgtgttgccaaattccctggtgccggcggtcaacctgctggcggtgaacatcggctggctgatcagtggcacggtggtgatcgaaagcctgttcgccatccccggcatcggccaattgctggtgcgcgggatcttcacccgcgattacatggtggtgcagggcgtggccatggtgctggcctgcgcgacggtggtggtcaacttcatcgcggacgtggtgacggtggccctcgacccacgggtgaagatgcaatgagcagccgcccgttgattgccccgtggcgcatgcgcctgcgcttcggctttcgcaatggccggctgacggcggcgtggggcctgttgattctgctggtatggctggcgcttgcgctatttgcgccgtggattgcgccgtatgacccgatcgcgcagaacactgatttcagtttgctcggtccgagtcttgcgcatccgtttggtacggataactacggtagggacatcctttcgagagtgatctggggcgcgcgcatcgacctgcaactggcgattgtcggggtgatcttccccttcatgatcggcaccttcatcggtgcggtctcgggctatatcggcgggcgtttcgacagtttttgcatgcgcgtgatcgacgtgatcctggcgtttccgttcctggtgctgatgctggcgatcatggcgattcttgggccgggcttgaagagtttctatatcgccatggcgctggtcggctgggtgtcgtatgcgcggctgatccgctcgcagatcctggtgctcaaggaaagcgagtttgccctggccgccaagagcctgggctttggccatgggcgcattctgttccggcatctgctgcccaatgcgatgttcggctcgattgtgttttccatgtcggacgcggtgctggtgctgctcaatggcgctgccgtgagctacctgggcctgggcgtgcaaccgccgaccgccgagtggggcaccatggtggccgaggggcaggcctttatcaccacggcctggtggatctgcacctttccggggctggccatcgtgaccctggccatgggcttcagcctgctggccgatggcgtagcgcaagtgttgggggatcgctcatgagcctgctgcaagtgcgcgacctcagtgtcatcgccaacaatgccgggcgcgatgtaaccctggtcgatcgggtgtcgttcgacttggctgaaggcgaaatcctcggcctggtaggggagagcggttcgggcaagaccatggcctgtcgcggcctgatgcgcctgctgccatcgcccagcctgcgcgtgcaaggcggcgcggtgcggctggccggtcaggatttgttggccttggatgacgctggaatgcgcgccgtgcgcggcggccaactgggcatgatcttccagaatcccagcagccacctcgacccgctgatgcgtatcggcgagcagattgccgaaggcattcgactgcatcaaggcgcgtcaaaaaaagacgcacgattgctggctatcgacgtgctgcgccaggttggcatccccgatccccaggcacgggtcgacaactacccccacgagttttccggcggcatgcgtcagcgcgcaatgatcgccgtggccctgggctgcaaccccaaagtattgatcgccgacgagccgaccacggccctggatgtgacagtgcaggcgcagatcctgcggttgctgctggacctgcgtgaccagcgcggcctgtcgatcatcatgattacccacgacctcggcgtggtcgcgcaaacctgtgattccatcgccgtgatgtacgccgggcgcctgtgcgagcacggcagcaagtacgacttgctggctcgaccccggcacccttacaccgccgggctgatcgattgccagcccgcccacagcagcggccacgccttgctgcgcacgatccccgggcagccgccgctgctggacgcattgcccgccggttgccgcttcaacccgcgctgcccgcaggtcggggcgttgtgcaccgaggtgttgccgcaaggtgctcgggtcgcctgtcattacccgttgggagcgcagccatgagcctgttgcagatcaaggaccttgaggtgaagtttgccgcgtccggcaccggcctgttcggcttgaacaagcagtgggtgagggcggtgaacggcgtgtcgctgaacctggccgccggtgaaaccctggggttggtgggcgagtccggcagtggcaaaagcacactgggccgcgccatcctgcacctcaacccgatcagcgccggccaggtgttgtttgatggcatcgacatggcccatggcagcgccatcgacatcactcgtctacggcatgaaaccgcaatgatcttccaggacccgtacgccgcgctgaacccgcgccacaccatcggtgaaaccatcgccgaggtgctgcgcgtgcagcgcaaagtcgcgccagagcagattcgcgcgcgcgtgaatgaactgctcgacctggtcggcctgcgccccgaactggccagccgcaagccgggctccctcagcggtggccagtgccagcgcgtcggcattgcccgggcgctggcggtggagccacgcctgatcatcgccgatgagtgcgtggcggcgctggatgtgtcgatccagggccagatcatcaacctgctactggaactgcaacagcgcatgaacctggcgatcctgtttatcgcccatgacctggccatcgtgcgccgcctgtgcgaccgcgtggcggtgatgtacctgggcaagatcgtcgaggagggaccggtggaagcggtctttacttcaccgcgtcacccctacacggcggcgttgatccaggcgattcccgagatcgatccgcatcggccgttacctacgcaacctttgccgggtgaaccaccgagcccactgaatttgcccacaggctgcgccttccacccacgttgtcggcatgcccgcgccatgtgttccgtggtgttgccgccaacgcatttcctgcacgagcatcggtacagttgcgtgcttgaagaacctttgctttgacccatccctgccattcatgaacaaggagttatgacatgcaatcgcgccacttgaagttgctcgccgccgccacactgaccgcctggtcgctgactgccggtttcgcgcaggccgccggtgtactgaccatcggctgccgtgaagacagcaccacgtttgacccgatcaaaagcgcgcaaaaccgcgacacctgggtcttcgccaacgtctacgacaccctggttcgcgtcgacaacctgggcaccaagatggagccgggcctggccgaaagctgggatatctccaaggacggcctgacttacaccttcaaactgcgtgacgcaaagttctccgatggctcggccattaccgccgacgatgcggcgttcagcctgctgcgtatccgcgacaacaaggcttcgctgtgggcggatccgttcaacctgatcagcacggccaaggcatcggacccgaaaaccctggtggtcaccttgaagaccccggctgtggccttcctctcgcaactggcgtcgccgacggtgtcgatcctgtcggaaaaagccatgaccaagatgggcgaagacgcctactcggaaaacccggtgacctccggcgcgtttaccgtggatgagtggcgcaagggcgaccgcgtgatcctgaagaagaacccgaacttctggcaggccaagaacgtgagcctggatggtgtggagtgggtatcggtcaccgacgacaacacgcgcatgcgcatggtgcagaacaacgagctggacaccgcgatcttcgtacccttctcgcgggttgaagagctgaagaaagaccagaacgtggtgatccacgccgacccgtccacccgtgaagatcacttgctgatcaatcatgcccacgggctgctggccaagccggaagtgcgtcaggcgttggacatggccatcgacaaacaatcgctggtgaagaccgccacttacggtcaaggcactgtggcttattcctacattccaaagggctcgctgtaccactacgccaacaacctgcagcgcccgtatgacccgaccgctgccaagaagctgttggagcaggccggtgccaaggacttgaagctcaactacgtggtcaatgccggcaacgaggccgacgagcagattgcggtgatcatcaaagaccagttggccaaggtcggtgtgactgccaacctgcaaaaggtcgacccgacccagagctggcagatgctggtggacggtgagtacgatatttcggtgatgtactggaccaacgacatcctcgacccggaccagaagaccaccttcgtgcttggccacgacaccaaccagaactacatgacccgctacaagaacgacaaggtcaaggacctggtggctcaggcgcggatcgaggctgacccggtcaagcgtgagcagatgtatgtggagttgcagaaactggcgaaacaggatgtgaactggatcgacttgtactacagcccgtacatcaacatctcacgcaagaatgtgagcaacttcctgcagaacccgttgggccgcttcaccctcgaagaagtggtgaaaaactaaaccacactgctgaaaaatgtgggagggggcttgcccccgatagcggtgggacagtcactgtatctgttgactgatccactgcaatcggggggcaagcccctcccacatttggttttacaatgtgccggttattgcgcgtcgaacgcctggccgttgatgccggtactgtccggccccatcaggtacaggtacaccggcatgatctcttccggagcaggccgctccatcgggttttccccgggatacgcctgggcgcgcatgctggtgcgcgtgccgcctgggttgatgctgttggagcgtactgctgccacatcctcaagctcatcagccaaggtttgcatcaagccttcggtcgcaaacttcgacacgccataagcgccccagtaagcccgacccttgcgcccgacgctgctggaggtgaacaccaccgacgcatcctgggacaatttgagcagcggcaacaaggtgctggtcagcatgaacatcgcgttgacgttcacgtgcatcacccgcatgaagttctcgccggacaactgttcgagcggcgtgcgcgggccgatgatcgaggcgttgtggagcaggccgtcgaggtggccgaattccttttcgatcatcgcggccagctcatcgtattgatggggcagggcggtctccaggttgaaggggatcaccaccggttgcggctggcctgcggcttcgatttcgtcatacacctgggccaggttggcttcggtcttgcccagcagcagtacggtagcgccgtgggcggcataggttttcgccgccgcggcgccgatcccgcgaccggcgccggtgaccaggatcacccggcctttgagcagttctggacgtgcggagtaatcaaacataaatagcctcgacagaattcagcagcttatgaaccccaactccgaaaacactgaagatccccagtgggagggggcttgcccccgatgagggcctatcagtccgataggtgcgggctggcacaccgctatcgggggcaagccccctcccacattggatcttcatagagggtgggggcgttgagtaatcagcaactgcacagtgcgttatcgagcaccttgcgcagttccagcgggtgatccaccaccacatcggcgccccaatggcgtgggttgtcgtccgggtggatgtagccgtaagtgaccgccgcggtgcgggtgccggcgtcgcggccggactcgatgtcgcgcaggtcgtcgcccacgaacagcacgctggccgggtccaggccgagcatcttgcaggccaggatcatcggctccgggtccggcttgctgtttttcacgtggtccgggcagatcagcagtgccgagcgttcggccaggccgagttgctgcatgatcggttcggcaaaacgcaggggcttgttggtgaccacgccccagaccagcttggacttctcgatgtcatccagcagctcggccatgccgtcgaacaacttgctgtgcaccgcgcagcccttgaggtagcgctcgaggaattcctggcgcagttcttcaaagcctggcgattccgggtccatcgagaaggtcaccgccaccattgcccgcgcaccgccggagatttcatcgcggatgtgctgcgggttgatcggcggcaggtcgcggtcggcgcgcatggcctggcagatggcgataaagtccggcgcggtatccagcagggtaccgtccatgtcgaagagaaccgctcgcaacttcacaggctcactcctcgcgcagggtctggatcatgtagttgacgtccacatcgttggccagcttgtagtgcttggtcagcgggttgtaggtcaggccgatgatgtccttgacggtcagcccggcctggcggctccacgcacccagctcggagggacggatgaatttcttgaagtcatgggtgccgcgcggcagcagcttcatgatgtattcggcgccgatgatcgcgaacaggtaggccttggggttgcggttgatggtggagaagaacacctggccgccgggcttgaccatgcggaagcaggcgcggatcaccgaggacgggtccggtacgtgctccagcatttccaggcaggtgaccacgtcgaactgctcgggcatctcttcggccagggcttcggcggtgatctggcggtattccacgctcaccccggactccaactggtgcaactgggccacggccaagggcgcttcgcccatgtcgatacccatcacggtcgcgccgcgttgggccatggcttcgctgaggatgccgccgccgcaaccgacgtccagtaccttcttgccggccaggttgacgcgctcgtcaatccagttgacccgcagcgggttgatgtcgtgcaaaggcttgaactcgctttcgcggtcccaccagcggtgagccagggcttcgaatttggcgatttcggcgtggtcgacgttgctcatggtgaatcctctaaatctgataaatcggtttgtcagtcttgaacgccggggttcaagaccttcgttattcgctgtgcccgctgatgcgttggccccaggcgatggccgtggtggtcaactggtgttcatccatgcgggtcaattgccggtcgtcgagcaattgcttgccggcgacccaaaggtgtttcacgcaatcgcgtccggtggcatatataagctgtgagaccggatcatagatcggttgttgcgccagccccgacagatcgaaagcaacgatatccgccgccttgccgacttccagcgagccgatctcactttccaggcccatggcccgcgcgccattgagggtggccatgcgcagggcgcgatgggcatcgagtgcggtggccgaaccggcgacggccttggccagcatcgccgccgtgcgggtttcgcccaacaggtcgaggtcattgttgctggcggcgccatcggtgccgatggccacattcacgccagcctgccacagacgctccaccgggcaaaagccgctggccagtttcaggttggattccgggcaatggatgacgctggtgttgctttctaccagcaaagccaggtcgtcctcgctgatttgggtcatatgaacggcctggaagcgcgggcccagcagccccaggcgacccaggcgtgccagcgggcgctcgccggtctgctcgaccgcttgctgcacttcgaaggcggtttcgtgaacatgcatatggatcgcggcgtccagttcttcggcgatcacccggattttttccaggttgtcatcgcacaccgtgtagggcgcgtgtgggccgaaggtgatcttgatgcgcgggtggtgcttgaggtcgccgaacagctcgacaccttggcgaatcgcctcgtcggcgctgccggcgccggggatcgggaagtcgaggatcggaatcgcgatctgcgcgcgcatgccgctgttgtgcacgcaatcgctggcgaccttggggtagaagtacatgtcggagaagcaggtgatgccgcccttgagctgttcggcgatggccaggtcggtgccgtcgcgtacgaaggcttcatcgacccacttggcttcggcgggccagatgtgtttttccagccaggtcatcagcggcaggtcatcggccaggccgcgaaacaggctcatcgcggcgtgcccgtgggcgttgaccaggccggggctgagcagcatgcccggcagttcgcgggtctccttggcggtcagtttcaacgccgcctggcgagtcccgataaaggcaatgcgcccatcgcggatgcccaggccatgctccttgagcaccacgccggcgggttcgacaggcaccagccacgtaggcagcaacaataggtcgagcggggcggcagtggcggtcatcgcaggcttcttcccaggcagctataaaagaagggcgaagtatacccgagcgtcctggctggcggatcgctataatcggcggctttgtttatgagtgcggagtaagggatgcgcgatcgactgttggctgcggagaaagtgaaggccatcgattggcgtgatggcgcactgtacctgctcgatcagcgtgccttgccgtcccgggaaagctgggtggcctgcgtgacggtcgatgaagtggctgcagccattcgctcgatggtagtgcgcggtgcgccggccatcggcatcagcgccgcatatggcctggtgctggccgcccgtgagcggatcgccgaaggcggtgactggcaggctgcgtgggaagaagactatgcattgttggccgatgcccgacccaccgcgtcgaacctgttctgggcgttgaagcgcatgcgtgatcgcctggatcgtgtgaaaaagcacgccgacccgctggcggtgctggaggcggaagccattgctatccatgaaagtgaccgcgaggccaacctgaccatggcccagctcggcgtcgagctgatccgcaagcaccagggcaacgcccaggccatcctcacccacggcaacgcgggagccctggcgaccggcggtgtcggtacggcactcggggtgattcgcgcggcttacctcgaaggcatggtcgagcaggtctacgccaatgaaacccggccctggctgcaaggttcgcggctgaccgcctgggagctggcgggcgagggcatcccggtgacggtgaatgccgactcggccggtgcgcatatcctcaagaccaaaggcgtgacctgggtgatcgtcggcgccgactgcattgccgccaacggtgatgtgatcagcaagatcggcacctaccagttggcggtgtgtgcgatgcaccacggtgtgcgtttcatggtggtggcgccgagttctaccctggacctgatgatggccactggcgatgacgttgccctggaagaacgtgatgccggtgagttgctggaagtcgccggccagcgcttcgcagcggatgtggcggccttcaatccggtgttcgacgtgaccccggctgacctgatcgatgtgatcgtgaccgaaaaaggcgtggtcgaacgaccggacaccgccaagttggccaaattgatgtgccgtaaacgcttgcattaagccaatttgccgccgaaatcgggcttggatccagctcagagcccctctcgtcgccctcaagcctgtcatccgtcaacttactatgctccatgcgcatcagggggataggtgcgtggcggcgattgtgataacatccggcggtttccagggctgccccgaggggcggcctataacgtgcagatccgtgtcataactcgttgatttgtcgtaagtcgttgtcaggcactctgccggcagcggcgagcttcgttcgtcccatatggatgtgacgaggtttcacccgaaaaaggaatcaggcttctcatgggcgaactggccaaagaaatcctcccggtcaatatcgaagacgagctgaaacagtcctacctcgactacgcgatgagcgtaattgtcggtcgggcactgcctgatgcgcgcgatggcttgaagcccgtgcaccggcgtgtgctgttcgcgatgagcgagctgggtaacgactggaacaagccgtacaagaaatctgcccgtgttgtcggtgacgtgatcggtaagtatcaccctcacggcgacactgcggtgtacgacaccatcgttcggatggcccagccgttttccctgcgctacctgctggtagacggccagggcaacttcggttcggtcgacggcgacaacgccgcggccatgcgatacaccgaagtgcgcatgaccaagctggcgcatgagctgctggccgacctgcataaagaaaccgtggactgggtgccgaactacgacggcaccgaaatgatcccggccgtcatgccgaccaagatccccaacctgctggtcaacggttccagcggtatcgccgtgggcatggcgaccaacatcccgccgcacaacctcggtgaagtcatcgacggttgcctggccctcatcgacaaccccgagctgaccgtcgatgagctgatgcaatacatccccggcccggactttccgaccgctgcgatcatcaacggtcgcgccggcatcatcgaagcctaccgtaccggtcgcggccgcatttacatgcgcgcccgctcgatcatcgaagacatcgacaaggtcggtggccgccagcagatcgtcatcaccgagctgccttaccagctgaacaaggcgcgcctgatcgagaagatcgccgagctggtcaaagagaagaagctcgaaggcatcaccgagctgcgcgacgagtccgacaaagacggtatgcgcgtggtgatcgagctgcgtcgtggcgaagtgcctgaggtgatcctcaacaacctctacgcccagacccagctgcaaagcgtgtttggtatcaacgtggttgcactgatcgatggccgcccgcgcatcctgaacctcaaggacctgctggaagccttcgtgcgtcaccgccgcgaagtggtcacccgccgtaccgtgttcgaactgcgcaaggcccgcgaacgcggccacatcctggaaggccaggcagttgcgctgtcgaacatcgacccggtgatcgccctgatcaaggcctcgccaaccccgtcggaagccaaagaggcgctgatcagcaccccttgggaatccagcgccgtggtggccatggttgaacgtgccggcgccgactcgtgccgtccggagaccctggacccgcaatacggtctgcgcgaaggcaagtacttcctgtcgccggaacaggcccaggccatcctggaactgcgcctgcaccgcctgaccggcctggagcacgagaagctgctggccgagtaccaggagatcctcaaccagatcggcgagttgatccgcatcctcagcagcgccgtgcgcctgatggaagtgatccgcgaagaactggaagtgatccgcgccgaatacggcgatgtgcgccgcaccgagattctcgatgcacgcctcgacctgaccctgggtgacatgatcccggaagaagagcgtgtagtgaccatctcccacggtggctacgccaagacccagccgctggctgcgtaccaggcccagcgtcgtggcggtaaaggcaagtcggctaccggcgtgaaggatgaggactacatcgcccacctgctggtcgccaacagccacaccacgctgctgctgttctccagcaagggcaaggtgtactggctcaagacctacgaaatcccggaagcgtcccgtgctgcccgtggtcgcccactggtcaacctgctgccgctggacagtgatgaatacatcaccaccatgctgccggtcgaggaatacaccgaaggtcacttcatcttcatggccaccgccaaaggcaccgtgaagaagaccccgctggaatccttcagccgccagcgcagcgtgggcctgatcgctctggagctggacgaaggcgacgtactgatctccgctgccatcaccgacggcgagcgtgaagtcatgctgttctccgacggcggtaaagtaacgcgcttcaaggaatccgacgtgcgcgccatgggccgtaccgcccgcggtgtgcgcggcatgcgcctgccagaagggcagaagctgatttcgatgctgatcccggaagaaggcagccagatcctcaccgcctccgagcgtggttatggcaagcgcaccgccatcagcgagttcccggagtacaagcgtggcggccagggcgtgatcgccatggtcagcaacgaccgcaacggccgtctggtcggcgcggtgcaggtgctcgacggcgaggaaatcatgctgatctccgaccagggcaccctggtacgtacccgtgtggctgaagtgtcgagcctgggccgtaacacccagggcgtgaccctgatcaagctggccaaggacgaaaaactggttggcctggagcgtgtccaggagccatcggaagtcgaaggcgaagagctggaaggtgaggagtttgagggcgaggtgatcgcagcaggcgataacaacgtcgacgagccaaccctcgacgctgccgcagacgaagaagaaccgcaggaataagcggacacacagggggcggatgaagattcgcccccttgttgtttgtcccttatgaaataacacgtcctttggctggacgcggtcaatgtgggagctggcttgcctgcgatggcagcgccgcggtatcactgcgctaccgaggtgcccctatcgcaggcaagccagctcccacaagggttcgctccagagaaaggttgttaccgaacatgattgcagccccaccagatcagagtgagattggatgtgagcaagagagcctataacttctgtgccggtcccgcggcgcttcctgaagcagtcctgcagcgtgcgcagggtgaactcctcgactggcatggaaaaggcctctctgtgatggaaatgagccatcgcagcgatgagttcgtgtctatcgccaccaaggccgagcaggacctgcgcgacttgctggacatcccatccaactacaaggtgctgttcctgcaaggtggcgccagccagcagttcgcccagatcccgctgaacctgctgccggaagacggcactgccgactatatcgacaccggtatctgggggcagaaggctattgaagaggcctcgcgttacggtcacgtcaatgtggcaggcaccgccaagccttacgactacttcgccattccgggtcagaacgagtggaagctgtcgagggacgctgcctacgtgcactacgtggccaacgaaaccattggcggcctggaattcgactgggtaccggaagtgggcgacgtgccgctggtgtgcgacatgtcctcggacatcctgtcgcgcccgatcgacgtgtccaagtacggcatgatctacgccggcgcccagaagaacatcggtccgagcggcatcctggtcaacatcatccgcgaagacctgctgggtcgtgcgcgatcgctgtgcccgaccatgctcaactacaaggtcgcggccgataacggctcgatgtacaacaccccgccggcgttcgcctggtacctgtccggcctggtgttcgagtggctgaaagagcagggcggtgtcgccgccatgggcaagctcaacgaagtgaagaagcgcaccctgtacgacttcatcgacgccagcggtctgtacagcaacccgatcaacctgaccgaccgctcgtggatgaacgtgccgttccgcctggctgacgaccgcctggacaagccattcctggccggtgccgacgaacgcggcctgctgaacctcaagggtcaccgctcggtgggtggcatgcgcgcctccatctacaacgccgtcgacatccacgcgatcaacgcgctggttgcctacatggcagagttcgaaaaggaacacggctaatgtctgagcaagaactcaaggccctgcgcgtacgcatcgacagcctggacgagaaagtcctggagctgatcagtgagcgtgcgcggtgcgcccaggaagtggcacgggtgaagatggcatccctggccgaaggcgaagtgccggtgttctaccgtcccgagcgtgaagcccaggtgctcaagcgcgtgatggagcgcaacaagggcccgttgggcaacgaggagatggcgcggttgttccgtgaaatcatgtcttcgtgcctggcgctggagcagccgctgaaagtggcgtacctcggcccggaaggcaccttcacccaggcggcggccatgaagcacttcggccacgccgtgatcagcaagccaatggcggccattgacgaagtgttccgtgaagtggcggccggtgcggtgaactttggcgtggttccggtggaaaactccaccgaaggcgcggtcaaccacacgctggacagcttcctcgaacacgacatggtgatctgcggcgaagtcgagctgcgcatccaccaccacctgctggtgggcgagaacaccaagactgacagcatcagccgcatctactcccacgcgcagtcgctggcccagtgccgcaaatggctggatgcgcattacccgaatgtcgagcgcgtggcggtctccagcaacgccgaagccgccaagcgggtcaagggtgagtggaactcggcggccatcgccggtgatatggcggcgggcctgtacggcctgacgcggctggccgagaaaatcgaggatcgcccggacaactccacgcgcttcctgatgatcggtagccaggaagtaccgccgaccggtgacgacaagacctcgatcatcgtgtccatgagcaacaagcctggcgcgctgcatgagctgctggtgccgttccacgacaacgggattgacctgacgcgcatcgagactcgtccttcgcgcagcggtaaatggacttacgtgttctttatcgacttcatcggccatcaccgcgacccactggtcaagggcgtgctcgagaaaatcagtcaggaagccgtggcactcaaggtgctgggctcttacccgaaagcggttttgtgaggcgttaacatgagtggcaacttcctcgccctggcgcagccgggcgtgcaacaactgtcgccttacgttccgggcaagcctgtggatgagctggcgcgtgagttgaacctggatccttcgaaaatcgtcaagctggcgagcaacgagaatccgcttggtcccagccccaaggtattggcagcgattcgtgaagagctggctgagctgacccggtatccggacggcaacggcttcgcgctcaagtcgctgctggcggaaaagtgccgggtcgagctgaaccaggtgaccctgggcaacggttccaacgacattcttgaactggtcggccgtgcctacctggcaccgggcttgaacgcggtgttcagcgagcacgcgtttgcggtctatccgatcgtgacccaggccgtcggtgccgatgcgcgcatcattccggcgaaagattggggtcacgacctgccagccatgctggcggccatcgacgcccagacccgcgtggtgttcatcgccaacccgaacaacccgaccggcacctggttcgacgcccaggcgctgaacgatttcctgcaagacgtgccggaacacgtgctggtggtgctggacgaggcctatatcgagtatgccgaaggcagcgacctgccggacggcctggatttcctggccgcgtacccgaacctgctggtgtcgcgcaccttctccaaggcctacggcctggcgtcgttgcgcgtgggctacggcttgtccagtgcggtggtcgccgatgtgctgaaccgcgtgcgccagccgttcaacgtcaacagcctggccctggcggcggcctgtgcggcggtgaaggatgcagagtatctggaagagggtcgccgcatcaacgaaagcggcatggtgcagttgcaggaaggcttccgcgaactgggcctgggctggattccgtccaagggcaactttatctgcgtcgatctcggccaggtggctgccccggtgttccaggggctgttgcgcgaaggcgtgatcgtgcgtccggtggccaactacgggatgccgaaccacctgcgcatcaccatcggtctgccggctgaaaacagccgcttcctggaggcgctggccaaggttctggctcgtggttgatgtcactgcattgcaacctgctgtgcctatgatcggtcgcctggtggtggtcggtctggggttgatcggtggctccttcgccaaaggcctgcgtgaaagcgggctgtgtggcgaagtggtcggtgtggacctggacccgcaatcgcgtcagttggcggtcgagttgggcgtggtggatcgctgtgaagcggacctagcgctcgcgtgccagggcgctgacgtgatccaactggccgtacctatcctggccatggagaaattgctcgccgtgttggcgggcatggacctgggccaggcgatcctcacggacgtcggcagtgccaagggcaatgtggtgcgcgcggcgcaacaggcgtttggtggcatgccgacgcgtttcgtgccgggccatccgattgctggttcggagcaaagcggggtggaggcgtcgaatgcgcagctgttccgtcgccacaaagtgatcctgacgccgcttgcgcaaaccgatccggcggcgctggcggtggtggatcgcctgtggcgcgagttgggtgcggacgtcgagcacatgcaggtcgagcgccatgacgaagtgctggccgcgaccagccatctgccgcatttgctcgcatttggcctggtggactcgctggccaagcgcaacgagaacctcgagattttccgttacgccgccggtggcttccgcgacttcacgcggattgccggcagcgacccggtgatgtggcacgacatcttcctcgccaatcgcgaagcggtgttgcgcaccctggacaccttccgcagcgacctcgacgccttgcgcgatgcggtcgacgccggggatggccatcagttattgggcgtgtttacccgtgcgcgggtggcgcgtgagcatttcagcaagatcctggcgcgccgggcctacatggaaaccgctgtgaacgctgatgagctgaccttcctcgccgaacccggtggccgcttgagcgggcgcattcgggtgccgggcgacaagtcgatctcccatcggtcgatcatgttgggttcattggctgaaggcgtgactgaggttgagggtttcctcgaaggcgaggacgcgctggcaactttgcaggcgtttcgcgacatgggcgtggtgattgaagggccgcaccatgggcgcgtgaccatccacggcgtgggtttgcatggcttgaagccggcgccggggccgatctatctcggtaactcgggcacctccatgcgtctgctgtccgggttgctggctgcgcagagcttcgacagcgtgctgacgggcgatgcttccctgtccaagcgcccgatgagtcgcgtggccaagccgctgcgggaaatgggcgcggtgatcgagaccggcccggaggggcgtccgccgctgactatccggggtggtcaggtgctcaaaggtttcgattattcgatgccgatggccagtgcgcaggttaaatcctgcctgttgctggccgggctttacgccgagggcaagacctcggtgaccgagcctgcgccgacccgtgatcataccgagcgcatgttgcgcggttttggttatccggttgatgtggtgggggccaaggcgtcggttgagtctggccatgcgctggttgcgacgcatattgaagtgccgggggatatttcctcgtcggcgtttttcctggtggcggcttcgattgccgaaggctccgagttgttgctggaacatgtgggcgtcaacccgacccgcaccggcgtgatcgacattctgcggctgatgggggcggacattaccctggaaaatccgcgtgaagtgggcggcgaaccggttgctgatctgcgcgtacgtgccgcgacgttgaaaggtattgaaatccccgaggcgctggtgcctttggcgatcgacgagttcccggtgctgttcgtcgcggcggcctgtgccgaagggcggaccgtgttgcgcggcgccgaagagctgcgcgtgaaggagtccgaccgtatccaggtcatggccgatggtctgctggcactgggcgtgaagtgtgaaccgacgcctgatgggattatcattgacggtggcctgatgggcggtggtgaagtgcatgcccatggcgatcaccggattgccatggcattcagcgtggcttccctgcgggcggcggcgccgattcgtatccgtgactgcgccaatgttgctacgtcttttccgaactttcttacactgtgtgcccaagtcggcatccgtgttgcccaagaggctcaattgtgaatatcaaagcaccggtgattaccatcgacgggccaagtggctcgggcaaaggcacgatcgccggcatcctggccaagcgcctgggctggtgcctgctggattccggcgcgctgtaccgcctgctggcattcgccgcacgcaaccatggcgtcgacctgaccaacgaagaatccctgaagctgctggcggcgcaccttgatgtgcagtttgttggcgcgacggaaggtcatccccagcgcataatccttgaaggggatgatgtgaccgatgatctgcgcaatgagcaagtcggctcctgggcctcccaggttgccgcactgccagcggtgcgggacgcattgttgcagcgccagcgggctttccaggagccaccgggcctggtggccgatggccgtgacatgggaaccgtggtgtttcccgaggcgccattgaagattttcctgaccgccagcgccgaggagcgggctcgccgccgctacttgcagttgaagggcaaagtcgatggtgttagtctgtcgagtctgctagatgagatccgtgcacgcgatgagcgtgatacccagcgcgcagtagccccgctcaagccggcggctgatgccatacagctggattccacggagttgtccatcgagcaggtgctggaacgcatcttgagcgagatcgccattcgcgatatcgccgggtgaccaagaaggctgcaggggaccagtcatagtcctgcggtgcttcttttaattgaaactgacccacaccgtctggggtgtggagatgggcgtattcttcgcccttatcaacaggaattaaaatgagcgaaagctttgcggaactctttgaagaaagcctaaaaaccctgaaccttcaggcaggctccatcatcaccggtgttatcgttgatatcgattaccaagctcgctgggtaaccgttcacgctggtctgaagtctgaagctctgatcccgctggaacagttctacaacgatgctggtgatctgacaatcaatgtcggtgacgaagttcacgttgctctggactcggttgaagacggtttcggtgaaaccaagctgtcccgtgaaaaagccaagcgcgctgaatgctggattgttctcgaagcagccttcgcagctgaagaagtggtcaagggcgttatcaacggtaaggttaaaggcggcttcactgtcgacgttaacggcatccgtgcgttcctgccaggttctttggtcgacgttcgtccagtgcgcgacaccacgcacctggaaggcaaagaactcgaattcaaggtcatcaagctcgaccagaagcgcaacaacgttgtcgtttcccgtcgcagcgtcctggaagcagagaactccgccgagcgtgaagctctgctggaatccctgcaggaaggccaacaagtcaaaggtatcgtcaaaaacctcaccgactacggcgcattcgtcgacctgggtggcgtggatggcctgctgcacattaccgacatggcttggaagcgtatcaagcatccttccgaaatcgtcaacgttggcgacgagatcgatgtcaaggttctgaaatacgatcgcgagcgcaaccgtgtttccctgggcctgaagcaactgggtgaagatccatgggttgctatcaaagcccgttacccagaaagcactcgcgttaccgcgcgtgttaccaacctgaccgactacggctgcttcgctgagctggaagaaggcgtggaaggcctggtacacgtttccgaaatggactggaccaacaagaacatccacccttcgaaagtcgtacaagtcggcgacgaagtggaagttatggttctggacatcgacgaagagcgtcgtcgtatctccctgggcatcaagcagtgcaaatctaacccatgggaagatttctctggccagttcaacaagggcgataaaatctccggcaccatcaagtcgatcaccgatttcggtatcttcattggtctggacggcggcatcgacggcctggttcacctgtccgacatctcctggaacgaagtgggcgaagaagctgttcgtcgtttcaagaagggcgacgagctggacaccgttatcctgtcggttgacccagagcgcgagcgtatctccctgggtatcaagcaactggaaagcgacccgttctctgaatacgttcaggacaacgacaaaggcgcaatcgttaaaggcatcgtgaaggaagttgacgctaaaggcgccatcatcactctggccgacgatatcgaagcgactctgaaagcctccgaaatcagccgtgaccgcgttgaagacgcgcgtaacgttctgaaagaaggccaggaagtagaagccaagatcatcagcgttgaccgcaagagccgtgtaatccagctctccatcaagtcgaaagacgatgctgaagagaaagaagccatccagagcttgaaagacaagccttcggatagcatcgctgctggtcctaccactctgggcgacctgttgcgtgcacaaatggaaaaacagaactaagttctgtcagaccataaaaaagggcgacttcggtcgcccttttttgtgcctgaaattcgttgaatcaacaccgagaaccaaggcgtatagcccagtgtcagaactgactatagtcttaagttaaaagcggttcttgtgttgtggcttcagtaaggatttgaatgaacaggcttatcgtagtgctcgcattggtaatgcttgctggttgctcggccaccagcgccaagacccacgccaaacgcggtgtgagtggtatcgaggtagattgctctggcctcggcaacagctggagcaagtgcgaaaaacgcgcggctcgagagtgcaagatgcagggctacaaggtcatcacccgatccagcgatgccagcgacgaagagggtgactatctgttcggttggaaccctgccggggcagtaacccgcactatgctggtcatctgtaattgaggtcggaatacgcctatagccggttgccatctatcctgcggataagttgttcggtgggctgttcaaattcatcaagtcatgctaaaaccttcgaagcgcttttcctagctgcttgaaaaagaagggaaaaatatgacgaagtcggagttgatcgaacgaattgtcacccatcaagggctgctctcatccaaggatgtcgagctggctatcaagaccatgcttgagcaaatgtcccagtgcctggcgaccggggatcggattgagatccgtgggtttgggagcttttcgcttcactatcgcgcaccgcgtgtgggtcgtaatccaaaaaccggccagtccgtcagcctggacggtaagttcgtacctcacttcaagccgggtaaggaattgcgtgatcgggtgaacgaagacgaggaagagggcgtctgatcgactttcaggagaacgttatgctaaaagccaggcgctttgtatcggttgtagctgttttgtttttcgcgctcattgtcgtgacttttgtgttggaaaatcagcaaagtacaaagctgtcatttttcggctggtctaccgttgaactgcctgtttcagtttttacgacgttggctttggtcgtgggaatgatcattgggccagtgctggggttgatagtgggtcgtaagatggctcgacaaaaggcttgatgtcttttcctgcagcatcctgttttctttagcggccgcagcctgagcaggatttgagacgtttatcctgtcatgtatgccatgccctgctggtctagtgaaaaacttgcgcatttgtctgcattaatgctctcgaaaagtcggtctgcgttattctcttgcaccgctcggggcttgcgccccttcccctcaagccgctgccaaggcgccttcttacgcgacatgcatccatgttcgcttttgactttaaggatgcaggccttaaaatggccatcaattttcatccccttcatctttaactgcaccacacaaagcttatttttcgggctgtttgctaacgagcttcgacgttttcctagaacctcttcaccgttgagcattccggggcggcatgttggctttgttggtctgcaggcattgaggtgattggccgactagaagcttgtcgtgctgtgcgcgttgctttaggacttactatgttcagcggaaaaacgcttcttatcaccggtggtaccggttcattcggcaacgccgtcctcaagcgcttcctcgacagtgatattgcagaaatccgcatcttcagccgcgatgagaagaagcaggatgacatgcgcaagcgctatgccgacaccaagctcaagttctatataggcgatgtgcgcgactatcaaagtgtgctcaatgccacgcgtggtgtggactacattttccatgcggccgcactgaagcaggtgccttcctgtgagtttcatcccatggaagcggtcaagaccaacgttatcggcactgagaatgtcctggaagccgctatccagaacgcggtcaagcgagtggtttgcctgagcaccgacaaggctgtctaccctatcaacgccatgggtatctccaaggcgatgatggaaaaggtcatggttgccaaatcccgcaacgtagatgatgccaagaccgttatctgcggtactcgctacggtaacgtcatggcttcgagggggtctgtcattcccctgttcatcgagcagattcgtgcaggtaacgcattgacgttgaccgacccgagtatgactcgcttcatgatgacgctggccgatgctgtggacttggtgctgtatgcttttgagcacggtcgcaacggtgatctttttgttcagaaggcgcctgccgcgacagtcgagaccttggccaaggcactgaccgcaatggtcggccggcctgagcaccctatccaggtcatcggtactcgccatggggaaaagctttttgaagcgttgttgagccgtgaagaaatggcctgcgctgaagacaagggtgattactaccggattccccccgatctgcgtgacttgaactattcaaaatttgtcgagcagggtgaagagaaaatctcccgtacggaagactataactcccataacactgaacggttggatgtggccggcatgcaacggcttctgctcaagcttgaattcatgcaagcgatccagcgtggcgaactcgctacgccggaggaataattgatgaaggtactgatcaccggggccaacggttttgtcggcaagaacctgattgcgcatttgactgagcgcagtgatgtcgaggttgtcgtctttacccgtgacaacagcatcgcccaactgccagcgttggttgccgaggtcgattttgtgttccatctggcgggggtcaaccggccccaatcgtccgatgagttcaaggtgggcaatactgacctgactgtggccctgtgcgacgcgatcaaggcaagtggcaagctcactcctgtgctctacacctcgtcgacccaggctgaccgtgacaatccctacggtgccagcaagctggctgccgagcaggcattgcacgacctgcaggcgagccatggttccagggttcatgtcctgcgcctgcctaatgtgtttggcaagtgggcgcgacctgattacaactccgccgtggcgactttctgccataacatcacccgaggcctgccgatccaggtcaatgatcgacaagcgatggttaacttggtctacatcgacgacgtggtcgagtgttttatccgggtaatggattcgggtttacctcatggcgcggcggctcaggtgagcccaatttacagcattgctgtcggggaactggccgatcaactgcatgcgtttcgcgacagtcgcgaaacgttgatcagcgaagctgttggcacgggcctggtgcgagcactctactcgacctatgtgagctacttgcccgtcgagcaattcacttatgacgttccgaaatacggtgacccgcgcggcgtttttgtcgaaatgctgaagaccaaggacagtgggcagttttcctatttcactgcgcatcccggcatcacacgtggtgggcattatcatcacagcaagaccgagaagtttctggtaatcaaaggcaaggcctgcttccgttttcgccatatcgtatcgggtgagttccatgagttgttcactcaaggtgaacagcctcgggtggtggagacagtgcctggttggactcatgacattaccaatgtcggcgaagacgagatgatcgtcatgctctgggccaacgaggtttttgatcgtgagcggccagacacctttgcgatgccggtgggtactcaagcctgagcatgagcgcatcaggcaatgcatggcgcgaacagctccgatgccaatgattctggaagagtgttgaaatgaaaaagctgaaagttgtcacagtcgttgggactcgtcccgaaatcattcgcttgtcgcgagtgattgccaagctggatgaacactgtgaacacgtcctggtgcataccggccagaactacgattacgaattgaacgagatttttttccaggacctcggtattcgtaagcctgaccattttctcaatgcagcgggcgcgagtggtgcgcaaacgatcggcaatgtgatcattgcggtggaccaggtgctggaggaggtgcagccagaagcccttctgattctcggtgataccaacagctgcatggcggtgattccagccaaacgccgtaaaatcccgacattccacatggaagccggcaaccgctgtttcgacatgcgtgtgcctgaagagatcaatcgccgcatcgttgatcacaccgcagacatcaacctgacctatagcagcatcgcacgtgactacctgctgagcgaaggattgccgccggatcgggtgatcaagaccggtagccctatgtttgaagtgcttaaccattaccgtgatggtatcgaagcctctgaagtgctcgatcgcctcagtcttgaggcgggcaagtttttcgtggtgagtgcccatcgcgaagagaacattgattccgacaaaaacttcctcaagctggtcggcgtgttgaacaccgttgctgcccagtatgacctgccggtgatcgtgaccacacaccctcgtacgcaaaagcgtgtcgatgcgatgggcgtaacctttcacaagaatgtgcaattgctcaagccgctggggttcaaggattacaacaagctgcaactgacggccaaggccgtactgtccgacagcggcaccatcaacgaagagtcatcgatcctgaatttccctgcactgaatctgcgtgaggcccatgaacgaccggaagggatggaggaggcggcggtcatgatggtcggcctggaggttgagcgcgccctgcagggcttgcagctcctggaaagccaggccgctggggcggaacggacgttgcgcttggttgccgattacagcatgccaaatgttgccgaaaaggttgtacggatcatccatagctaccgtgactacgtcatgcgcactgtatggaagcaatattgattggacagcctctccccggaaaaaccactgaagattctggtggtcacccagtatttctggcccgaaaacatgcgtatcaacaacatggtcgaaggctttgtcgccaaaggtcatgaggtgaccgtcctcacgggcgtgcccaactatccggaagggcaagtctttgccgatttccggcgtgaccctgcgcagttttccaattatcggggagcgcgagtgatcagggtgccgatgctggcgcgaggcaagagcaatttcagactggccatgaattacctctcgtttttcagcagtgcctcaatcattggcagttacaagctgcgtggtcaggcgttcgactccatctttgtgtatggcgtgtcgcctatcatgggggcgatcccggcgctgttgcttgggcgcttgaaaagggctccggtacttatatgggtgctggatctttggccggaaagcctcagggcggttggggttatagaaaacccgaagttgcttggactggttggcaaggtggtgtcctggatctacaaccgcactgattacctgttgttgcagtcacgttcgttcgacgagaacgtcaaggagtactgcacacgtgcaattgatgcagaccgactggtgtatttccctagctgggctgaggatgatttttccgcagagctgcaggggccttcggagttgctgcagcgtgacgatgctgtatttacaatccttttcgccggtaacatcggcgatgctcaggattttccagccatcatggcggcagtcaaggctgtcgagaccgatctgcctgtgcgctgggtgattgtgggggatggtcgggcaagccaatggctgaccgagcatgtggcgcaaaaccgcatggacaacgtgctactgcttggcagacatcccttggagaagatgcctgcgttgttcgccgtcgcggacgctttgctggtttcgttgaggacaaatgacgttttcgagaaaaccattccaggcaaagttcaggcttacctggcttctgggaaacctgtaatcgccatgatcgatggtgaagcggccaacgttgttgaaggatcgggtgcgggcatggtgtgtcgttctggcgatgcccaggggttggcgcgtatcgttcgcaccatgggcgtcttacccaagtccgagcttgagagcatgggcctgttgggcaggcgttactaccttgagcatttttccaaggacaccttgttcgatcgtcttgaggcgctatttagaaaagcgaccttgaggcgtaaccaacaatgaccagaaccctttgcccgtctctgtttcaggaattgtttgcgaaatgaccctctggttcgtgtttgccgcagtactcctcgtatcacttttgttgacctgggtactgcgccgctatgctttgtcgcgtagcttgatggacattcccaatggtcgcagctcgcactcggttcccacgccacgaggaggcggggtcgcaatcgtgctgactttcctggtggcgttggtgctcgttgcgctcgctggctgggtcagttggaatgcagcatggccattgctgggggcgggcgcattgatcgccgtggttggctttctcgatgatcacggccatatcgccgcacgttggcgcctgttggcccatttcgccgcagccatttgggcgttatgttggatcggagggctgcccaccatcagtctggccggggttgaattggaccttgggtggttcggtcacgtgctggcggctttgtacctggtctggatgttgaacttgtacaacttcatggatggtatcgacggcattgccagcatcgaggccgtctgcgcctgttcgggagcgtgcctggtgtactggctgacagggcatgaaagtctcatgcttgcgccgatgttactggcagtcgccgtgcttggattcttgtactggaactttcctcccgcgcgcattttcatgggcgatgcgggtagcggcttcctcggtgtcgtaatcggtgtgttgtctctgcaggcggcctgggcggcccctcagatgctgtgggtctggctgattttgctgggtgtgttcgtggttgatgccacctttaccttggggcgacgcctgttgcgcggggataaggtctatgaagcgcatcgcagtcatgcttatcagtatgcctcgcgccaggccgggcgccacttgccggtgacgctgacggtgatggcgatcaatctattgtggctgctgcccatcgctcttttcgttggccttggttttgacggtgttcttgggctggtggtggcgtatgttccgcttgtagggctggcgatcaagtttcacgcgggcgagttggaaaaagtgtgatcattggttgacgctggtgtttgaaaaggttgctgcacacgtacgtgactgccattttttgctggcagcgctagggactgaggtataaaaagggtttatggatagtctacgtgcccgattggtgggcttgccgcgcaggcaaaaacgtttcttgcaagtagtgaccgacatcgtcctggtgtggggagcactgtggctggcatttgtcgttcgcctggggtttgatgatcttaacaaccccttcgtcgtgcatttgtggttgtttctcagcgcgccggtaatcgctatcccgttgtttatccactttggcatgtaccgtgcggtcatgcgttattttggcaatgatgcgctgattgcaatcatcaaggccgtgagcctctctgcattattgctggcgctggtggtgtacctgtacagcaatcaccagacggtggtgccgcgctcgatcgtattcaactattggtggttgagcatggtcatcattggcggcctgcgcctggccatgcgtcagtactttcaaggggactggtttactgcggcgcaacacgtgccgttcaccaatcgtgatgatggcttgaccaaggtcgctatctacggtgccggggccgcaggtaatcaattggtggcagccttgcggctggggcgggtaatgcggcctgtggcattcatcgatgatgacagcggcatctccgatcggatcatctcggggttgaaggtgtacaagcccaagcgtatccagcagatgatcaatgagactggcgcggaagagctattactggccatcccttcatccacacgggctcgtcgccgagagatactcggttatctggagggatacccgctgcatgtgcgtagtgttcccggtttcatggatctggctagcgggcgcgtcaaggtcgatgatatccaggaagtcgatattgccgacctgctgggtagggaccctgtacctgcgcagcccgaactgctggagcgatgcatcaagaatcgcgtggtactggtttccggcgcgggcggttcgatcgggtcggagctttgccggcagatccttacgctggaacccaccagcctattgttgttcgaccacagtgagtacaacctctactgcatcctgtccgaacttgaacagcgcgttcaatcagaattgttgaatgtgacgttgttacccatcctcggttcggtgcgccatccggacaaactgctggatgtcatgaatacctggtcggtcgacacggtctaccatgcggcggcctataagcatgtgcccatggtggagcacaacattgccgaaggcattcttaataacgtgatcggtactctcaataccgcgcaggcagcgttgcaggcaggtgtcgagaactttgtgctcatttcaaccgacaaggcggtgcggccaaccaacgtcatgggcagcaccaaacggctggcggagcttgtgttgcaagcgttgagcaaggaattggcaccgacgttgtttggtgatgcgtcgaatatctcgcgcgtcaacaaaacccgtttcaccatggttcgctttggcaacgtactgggctcttcaggttcggttatcccgctgtttcataagcagatccaggcgggaggccctttgacggtgactcatccgaagataacccgctatttcatgacgattcccgaggcggcgcaactggttatccaggcgggttcgatggggcagggcggcgacgttttcgtgctggatatgggtgagcctgtgaagattgtcgagcttgctgaaaagatggttcatctctcgggcttgagtatccgctccgagaaaaacccgcacggagatatcctgattaatttcagtgggctgcgtccgggtgaaaagctgtatgaggagttgttgattggcgacaatgtagcggctactcgtcatccaatgattatgcgagctaatgaagagcttctggggtgggaagtactcaaggccaggttgcacgggttattggcggctgtcgaggagggcgattttgcgctcgtcaggcaactcttgaaagaaaccgtcagtggctatagcccggaaggtgagatcgtcgactggatgcacattcagcgacaccgtgaagtctgatcatctggtggacgctctgatgggcctatttggaggcccatcaggtaaaacttaagttaaagcttccagagttttttgttcagtctgaagctcgataggtagacgaacagtctcgatatgttcatgaacctgttagggcctacagtgtaaagaaccacctttagcaacgagttgatgatctgaagctttccagagtgattttgtgcgtcaccaaatcctgccggtttgtatggcccgcctttttcgaacaaatagttcttcttggcaaattggtagacagggccgctcgcatcgaacggctcatgctcggcaggcagttcatccagtacggcggcgtaggcccttctcagcgtgggcgaaatgtatttcccatcgctcatataatcaaaggcataggctgcgttggaagggaaggctgaaaagttggacagccgttccttgtaatagaagctgacctccaacagatcttcacgtttttcttctcttcccgcaaatgctcgtttgctcaagcgttccggattcttctcgtcaaacgaactgaagtggaagaaaaccagcgggaactctccatttaccgtatagccaccctggccgtcaggggcgagggtgcgctcatggctattccaaaaagccatgttgtagccaagattgaacgatacgtgcagggtcgggaagaagcagggggcgatgctgacccacttctggtcggtggagaggccaaactgagtttcgaaatagcaatgttccagacagcgttcattccaccactggagaaagcgtatgccttctgacgtgtttgaaactgcgtagaagcccagattgaaggagccaaagcgcagcatcccgacatcaccctcgacatgaggcgtgacgtagtggggcgttagaatgatgtcacgcgtaccgagttcgtcccataggccatcgaggcggctgaaaacgcacgtgtcggggtcgaggaagataaccttctcgtgttgctcaagcagctgcaaagtgatccagggcttgagactggtactgaactccacgatgtcgtatttaaaggcgtagtgctggacatttggcaatccgatctcttcaacccaatggaactctgccaggtgggtggggagatccatctcgaccttgcgatcaaaaatatagatcttcagtttaggctgaccgaatttaaccagcgactcggccagcaccaacgctttggacaagtaagccaagttgcacacagtaaaaatggctgagcgctcgacggtcatgcctttttcatcagtcacgtttaaatattcctaatgtattgattactctgacgaggatctgagacgtgcagtagagggtcagtaatcttgtgattctgagcgcgaagctgaactgacagctcgcgagcgcagaaaaaataagtttcaggttcgaagataccgtgtcttttattctggaccatgaatacgcccgcattgaatacgtacggccagcaattcggtagcgactgtcagcctgctcggtcacatgatcaaagccaggtgtggcgccacagacgccgattcgatagcctttattcaatgaatccaggcacagcttataatccacgctgtcgacaaagtagctgcaatccatccagcctagagcgttgagtttatccagaaaataaagactgccactgttgatcagtaggggcacatcgcgtacagacgcgcttccatcggccttgaaagcgatcgcgctgaacgcattgtaagcgtcgaggtggtcggtatagtttttttcgacatgggccagtgtttcttcgttgaaccccgtgtcctgatcaaaaaacagaagtgccgagtggccctgttgataggcgttggcgcataccgttgaaataccgatgcccagccccagatttttaccgcaggtaaaatagtggatctgcggatgatgttcggcgaatgcccgcacgctggcattatcaggtgaattgtcgaatacatagacttcaaacccgtttgccgaagtcaattcaagcctgtgcagtaattcaacgccggcgtgatagacaacaatccctacagcaatcttacgtgtcatgccatacctttgatatgtggagccgcccgtacccggtcgtgtttatacacttaaccatttgctctctttatcgctccatactttcacaaccctggcagggcagcccacggcaatgacgttgcctgggatatctttggcaacaacgctattggcaccgatgatcgagccactgccaatggaggtgttcggcaatatgacgacattgtccccgatccacaccttgtcgccaatggtcacagggccgctgctggacagctttcgttcgaacggtgtttcgtaggggctggactggtcctcccccgagtacgcgccgtgggagtggtccgtgatatggatcttgctgcccatcaacacatcgttgccgatggtgaccttgttacaacaggcgatatgcaagtggtcgctggcagagaaattttcgccgatttcgatacggggttgataggtgaacgcaaggtattgaggaatggcgtgtagccagagtccctcacccaccctgaagttgttacccagtgcgatattttccagtccaaataccttgggcgcacggccgaggtaggcgcgcctgcctggacccggaatcgtcctgaggtgaatgagcgcgcgccacaccaagagaaatctccccgcaagtagcgggataatgaacaggtggtgttgttttaatttctttagaatatatgacaccgcgtttactcgtacttgggtgttaacggatcttggttggctctggactttattgatgtccggatccaggcggctgattgcgtgtaaaccgaagataagtgtcggccatggctttaagcagggggcggggggtaagtgaaataacagcgacaatcaggagtgggtagtcgatggacaagcgtaaggcatgcttgaattgcctgtacgtcgaatagctcaagagcccacgaacgcgcagagataccattccccttaccgaaaaagcccccgacacggcgccgaaactacggcatgcagaaagtttgctcttcagtgcatagctcgatggcagtgagaaaataaagttcacccatttttccaccccaacttcaaatatttttggcgtatgtgcccagcctttcttttgcagggttgggctctctagtgaagtaatagatatgtctcgctcccatcggataactgcattgccacgcgccgcatgttccaatatgaccccggtctgcatgtagtaagaaccgatgtagcggttgaagtccgctgtggcgatcagttctttattataaatcaggcagctcatgcagctcattattccggctagctcggtcaacaaagcatccgggcaactatagtcttggctggctgttgtgtttttatcgatgagattgacgactattgcgctatagctatctgagctttcgattagcttgagtacggacacgatacctttttcggggatttgcgacgtatcccccaagagccacacgtattgggtgtccgcagccttcagtgctttctcgaaattggcctcaggacccagtgtggtcgcgttacgcaggctatgaataaagccgtattctttttgccacttcgcgatcacgtcctgtgtgttatcggtcgaggcattgtctgatatgaaaatttgtaggttgtggctgcgggctagcggaacgtgtaccgacagggatttatctagaaagtccgctcgattgtaggacggaatgacgattgagagagaggggttgccaactggattcatgcgtgcgatctcttgaagtttttaaatatccagtacacccagggcgtcaccaagcaaagcgcgctaaagaaaccgagaaataggtaatcgaagggtagataaatggagataaccagcgtagttgttgctacatacacgccttgtaccacggacgcggtaaccagcggctcttgtttgtgagcccgcatgtagacagccatcgagttgatccataactggatcaaccagccaaatccaaccaatgccaaggcgacatgtgacagcaggcgatttgcgatcggcaggtaatccttgaggagttcgatgcctgtaaacagagttgccaagcccagtatgtaagtcaccgtggcgagcaggagggcgcgtttgaaggtggtgtccagcgctgggtaatcttgctgtgcaacatacatgttcatcttgggtgtgttgattgaaacccagatgtttgcgatgctgaaaagcgccatgcatatcgccatcgatagacccacttgtccagcctctactgttccgtaaaagtggaatgccaaaggggtaaagatagacagaataaaataaccacttatccagctgacagcaaaccgccacatcagtggcatgatttctggcgcccacgcgtgttgggcatgtttaccggcggtataaagctgttgaagcatttttttatagcggcagccgatcaggaccagcccggtcgtcgctccggctagcagggctattgcaagggcgtaaagctcttccccgcagaacagcagaagtgcggtcacggtgactgtgcttacgctgatgtagaaccggattttttgcacatctccgacgctatcgcacccttcgataaacgacagtaacatgctgttcaggaagaccaatacggacgctgcaccatagatgagccagggaaattgccagttgatagctgaacccttgctattcaggaaaacatacccggcccctaataccagggggaaaatcaccatggccattgcacttgaccacttcaaggcaaatttgccaagggttgccaagcggatcatgtgcttggtatcaccggtaagcgttttatcagggttgaacttcaggtgcgcgaattcgtgggatgaaaacagtaaaagtattgacgaaaaacccatgtcagcgaacacagccagggctgccaggctaataaaggtgtaccagtagccttgggcttctgcggagaggtaaagggggactaacagcagtagcagagggccggaaaacaatctccagagctgattgatggcggagtgtcggacatcgtagctcagtaacgttttgagcagcatatttttcacggctgatggcacattctatttttcaacttttgagaaggctggagttttatcaggggcgctctacatacatacgcgctgcatgtaagcgtgcccccaaactgagtggctgcaggttactatttcccggccagctcttttgcgacctctatgatcaggctttcctggccagcaactgccttgcgttcacccagtcggaaaaacacgtcccttgggtctacaccaaattctgcggccgctctggccacgggtttggcgaagccggaaaatactccagcaagaccgctcacgattgagactggggaaatggagggtgcgataaaccccagttccttttctgccatcgtggcagcgtctaggattttgaatagatcaatcccagtgtcatatccgagtttgtgcaacacccctaccagcacttcaagctgtgtattgccggcgccagcgccaaatccacggatggtgccatcgagaattgtcgcgccttcattgaccgctgttacggagttgattacagccattccaaggttattgtggccgtggaagccaactgggatggacaggccatttaccaaagtgctgatgcgagctttgacatcatccaccatctgagcgcccgcagagtccatgatgacaatagcctgggctccataggactccattttcctggcctcttcaagcagcactgctgggctggccatatgcgtcatcatcaggatgccccatgcttccttgcctgactctcggatatagccaatgtggcgctgggtgacatcagcctcggtgcagtgcgcggcaatccggaatacgtcgacacccagttcgactgccttgctcaggtctttcttgatggtgcagaagcccgggataacatggattgccaatcgagtgttgctcagatgctcgcgggagattctgagaatttcctggtcactgagccggctctctccaaccagcatcgacgagccaccgaggccattgccatggccgacctcgataatgggtacattcgctacctccgctgccttgcaataagcgacgaacgcttcggctcccaatttatgccctaccgcatggttaccatcacgcaatgttggatcggtaatgagaatttgcttaggcatgcaggttttccttggcgtgaaaggaggtcgcgatcatttctgcgacagcaatagcggcacagttgatgatgtccaggttgccggcatactgcggcaggtaatcgccgttacccacgacctttatagtcgtcagtactcgatctccttcaaccgttggtgggacgatcagcgcataaccgggaacatactcctgcagctttgcgaccattgcgtctaccgaatgacggatagcaggaatatcagggttggtgatcttggcgtagatggtcgtttgcatgtcgatcggcgggttggccgggttcaggatcagtatcgccttcgtccgctgtgctcccgagaagcgcattagcgcatcctcggtggtctctatgtactcatcaagattggcccgagtggccggccccgcactgagtgatgcaatgctggaaacaacttcgatgtattcaacattggcatgaacggcagcaatcgcactggcgatgggaatggatgactgcccgccgcaggtaatcatattgatgttctgcgtatctccgcctacacattccctagcgttgatggcggggatgcagaacacccccagctttgccggtgtcatgtcgatgactgtctttccgagcttgcgcaatgcatcccagtgctcaacatgtgcatgagcggaggttgcatcaaaaaccaggtcgcatacatcaggcgacgagaggatcgcaccaataccctgatcggatgttggaatgcctagctcggcagctcttttcattcctgccgacgagtagttacgcccggcgaaaagcgtacatacaagatgctgagagcgcattatcttcacgagcaggtcggtaccaatattgcccgaaccgataatagctactttcagtacttttttagtgaccatcacatatatccaaggaagcgcagaatcaaagcaagccgttattttactcgtagctcgttgatctcaagcgcgtgctgtgtttcgtgcaaaaagaagaagttggtttctagcgtctggtcatccatcaggccaaatgcacggagatttccctccgcgtcagcggtgaagcattggtagcccagtccctgaaaaagctcgatgatttggttggggtggtagtcaaattttgctgcccattttcgcagcatttccgtgaatacaataggcttgtcctgggccaacagtttcagcgcaccctggaagacaaaaagctcggccccctcgacgtcacatttgataaagtcgaccttgggcagacccagtcgtgttgacgtgtcgtcaagtaccttgacatcgcaggtaatctttttgacgtcggagcgcccgctcaagttggctgaagaggcatttcccgagcctcctgggtagaaatagaactctagggttttctcttccgaagagaatccaaaattgaaggtcttgatattgtccagctcgttgatgcgcacgttttcttggagcgccagatacgtggaatcaatgggttcaaacgcgtagacattgacgcctgggttctttttggcgatgttgagggcataccatcccatgtttgcgccaatatccaatacgcaggcatttggcttgaccagtttcatgatcatgtttgaatctgtcagctcataatcgccaaagttgagaatctcaaccggcgcaacacgcttgtcaaactcggggcatacaatttttataccattgtcgcgtgaggtcatgaccaccttgccatcggtgatttctatgcgggcaacgtttgtttcttgcaaccatgatgcataggaaaagagcttgctatggaagtcactgtacattccatctatatagtcaggtttgctcaacacttggttttcaaagcactgacgcatctcttccatgttcttcatgtgtaactctcaatggttttcttgaagccctcacggacaggcgtccgggggagccagccgagcttttcgactttagtgatatctgggcagtttctgacaattgggcttactaagtacgtactgtcattttcgcggggagcaagcaaaacgctcaattttttttcggggtatagctctaccagtatttcggccagctctccaatactgatttctcccgcggggttaccaatattgtatgcctcgccgtgggtgccgttgagcaataccgtccagaagcctgctaccgcgtcggctgcatagcagaaggcacgtctcgcagtaccatcgcttttcatggtaatgggctgattattcaggatattggccacaaaatcagcataaacccttccgtcatttaatagcatgtgagggccgtaggtgtgaaagggcctgacgatggtggccggtacgccagcttggtggtgccaactgacgcacatgttttcacccattcgcttgctttccgcgtagcaagcacggaccgaggtcgggtcgacaaacccgaagtctccctccaaggtcggtaccctatcagtctgtccgtacacctcgccgctgctgaagaagagaaaccccttggatttgctcagggctgcaagtttcagcagtgcagcggtccctagtgtgttggcactcaaggtgccaattggatcggtcgaataatacttggggctggcctgactggcggcatgaatgatgtagtcagggcgcacgtcgaattccaaaggattactgacgtcttgttctatgcaaactaagtccgatctgcctaacacatgcgcaaatctgctctcgaagcgctgccggctacgaaccagggcaaagatctggatctccaacccttgtgtttcgttgagaaacaacagcgtttctaccatgtaggcggcgagaaaaccggaggcacccgtaatgagtaccttctgccccctcagacgatgccaaggtaacgggtactgggtcgtaatcgctagcagatcgctcgcgacgatggcattgcgcaagatcttttccatgggagggcttacgcgcccagcgtcttggatttttcatgcatgcccttgagcatggcactctccagttgatcacgtggaatcagtggcgagagatcttccaggggtggagagaccagcgaaccgtcttctttcactatcacggaaagtttcggtgagaacagttgctctgggtgcataaacacctcgcagataatcggtccggtcgcggcctgcactttttccaatgccgggtccacgtcatcccaatgacgaatctggcaagacgggatgccaaagccagttgccagttttgagaagtccgggcacgaaacgcccgaggtccgatcagtccccacgtaagaacctttgaacaaggagttctgagtgtgcttgatcatcaagtagccatcgttgttgaagatgaaaagcttgatcggcaattggtggtgcacgattgtctgcagttcttgcaggttcatcatcatgccgccgtcgcagttgaggcacattacctcacccctgtccgtggcgaacgatacccctagtgctgcaggcaagccgtagcccatctcaccgaggccggtagaggtcatcaggcgctggccatctttcagacgcagtacctggtgcccacacaacagggcggtacccatatcggttacaacgatctggttcggcttgaatacgccgttcaggcgctccatgaaacgataagaatttatgaagccgtctttgtcagcatgctcttcacccacccaagggaattgagcttcataggctttacattgcgccaaccattgcgatttgctaggaattaccagtgtctccagacgagcgctcaatgcctcgataaaggcggcagcgtcactgatgatgacttcgtgtgtgcgtgaagcattcttgatcgcctcttcacgactgatatctaccacgtcgatccttgcttcgcgcgccagctcggtcaggtcataaccgacctgtggtatggccagtcgagtaccaatggcaagtatgtagtcactgttttgcaggataaagttagccgagcgctggccgtagacgccagcgcgtccgaatatcaaagggtgatcggagtcgatcatgtcgatacccgcccaggagacaaggcccggagtaccgagtttctccaggagcggtgcgatacgcttttcggcgccagccaggcggatgccgttgcccagccaaagcagtggccgttcggctttgagcagggcggccacgacgctgtcgacttgggcgcccacttcagcgctgatcgttttatcggtaacgggcgtcgggaaatgcgccatttcgttggctggaatgcggctggactgtatgtccattgggatttcgatccaagttggacccgggcggccttccagcgccacgtatgcggctttttcgagctcgtagacggcctgctccggctgggtgacgcgttgagtgtatttgcagacccggctcaccatctggcaggagtcgtagccctgaacgccccacatgcgcaaagggttatccaccgagcaatgcttggagtgctcattacccgcgatgaccaggcacggaatggagtcggcccaggcagacaccactccagtgacgccattggtggaaccggcgcctgtggtcagcaatgctgcggaaagacgaccattggtgcggtaataggtctgtactgccatgcaagcggcctgttcatggtgcacacagacaatctcggtgtagccacgacggctgatggcctcaaaaagatgaacgttaccggcgccaataatcccgaacgcatgtgtaatgcccaggttttccagtgcttcagcaatctgctcactaactttgattttttccagcgcttgcattttaaaactccgtcgatggacgcttcagcctgctcgaagaccagtagctgagttttgaaaaattatgggtgaggcacccatgtcttttggggcgtttgctggtcaatcaccatcccgaactcgagccgtgggcgacactctcgtgcgtcaggcatgatgacctctatcaacatggggcggggagcttccaaaaactccctcacagggacgtgaaagtcggtatcccgcgtcacgaccctgccagtgatgccataagcctcgccaatggctttgaattgagacgtgtagccgttccagtaggtggatgatgttcgaccctcaaagtacatttcttgaaagccgtgcaccatccctaaggaatgattgttaagcactattatcagtatcggtagttggtctcgcgcgatgatatccagctcttggatgttgagctgggcgccgccgtcaccggtaatgacaatcacaggcttgttaccagcgttgcaaacgccgatggctgttggaatcgcgaaccccatggcgcccagcccgcctgagtgatgcatagattggccatgacttaagcgtagtgtgtgagccacccacatctgattgttgccgacgtcggcaacataatcgacagcttggcctctggcctgctcacaaaggctcgaaaaaatcacgaaaggactgaccagccagtcgctgtactcgtccacaaagctgatctggaagcgggcacgcaattcggcagcccagacaatccaagcttttttattctgcacttgggaaagggggaagtgggcaaagaaggtgttcaattccatcacataggacgcgtgtgtttgaacccggttgttcaattgcccttccatcaggtctatctggataattttggccttgcgggcgaaatcatccggttttgcgccggtttgtcgaacgtccaggcggcttcccaataccagcagaaaatcgcagttttgtacggcgtgattggcagcacgcgtcccgtaggcgccgagcatgcctaggtagttcgcgctcgccgggattttttctgcgcctttcaaactggctacgtaaggaagatccagggcctctaactgcccgagccattgcttgaagtggcgggtattgaccgcccctccacccaaaaggatcaagggcctttcagcggatgccagtgcattgctgatcgcctcaatgtcgtattcactcagctgactcaccgcctgtttgtcactcagtgccaacagtccatttacgacgcggtcatcaatgtcggctcgctgtatatccatcgggatgtccagcaataccggccctgggcgtccttccctggcgatgtcgatggctttttgcaggcagggaagtaactcgtcgacctgtgtgacctgataggcgtacttggtaatgctgccggctagtgccacgctgtcgagctcttgaaaaccctgttggcggatgtgcctctcgcctttgagttcgtaggtattgacctggcctgtgagaaacaggcaggggtggctgtcaagccagcagtcggctatgcctgtcattaggttggtggcgcccgggccgcttgtgcccagggccacgccgagtaattcgtggtgcgttgtacgagcaacgccggatgccgcaaatgctgctccttgctcatggtgaactgataccagcctggtcttgcccagcttattgatgctgtcaaccaggtgcgtgatcatcccgccgatcagttcgtaaccatacagaaccttgttctgtgcaagaaccagcgccacggcatccgatgctttcatcgcctagaaaccaatcccgaagaactcttccagcttctcaccgacaaaatcgaaatgctcctggcccagcgccggctgcacgccgagccagaaggtctggttcatggtgcggtcggtattggtcaattcgccaaccactcggtattccagattctggaagtaaggctggcgggtcaggttgccggcgaacaggaggcgtgtgccgattttgtgctggtcaaggtacttgagcaggtcgacacgcttgacgccgctgctttccttgagtgttaccgggaagccgaaccacgatgggtcgctgttgggtgttgcctcggcgatttcgaggaattcggacaggctggacaagcgctctttgagcagcacgaaattgcgcttgcgcgtgtcgatgaagtcctgggcgcgttcgagttgcgccaggccgcaggcggcctgcatatcggtgattttcaggttgtagcccaggtgcgcatacacgtacttgtggtcatacccttgaggcaggctgccatattgctggccgaaacggtcgccacaggtgttgtcgcagcctggcgcgcagtagcagtcacggccccagtcgcggaacgactcggcaatcactttgagcatcgggttgttggtgaataccgcgccaccttcgcccatggtgatgtggtgcgccgggtagaagctgagggtggcgatatcaccgaacgtgccgaccagcttgccatcgtaggtggcgcccagggcgtcgcagcagtcttccaccaaccacaggttgtacttttcgcacagcgccttgaccttgcccaggttgaacgggttgcccagggtgtgagccagcatgattgccttggttttcggcgtgatggcggcttcgatcaggtcggcattgatgttgtgggtggtcatgtcgacgtcgacgaacaccgggattgcgccaaattgaacgatagggttgaccgtggtcgggaagcccgctgccacgccaatcacttcgtcgccctttttgatcgcccgctcacccagtttgggcgaggtcagggtgctgaaagcaaccaggttggcggaagagccggagttgaccgacagcaggaatttgacaccgaggaattcagccagctttttctcgaattcagcattgaagcggccggtcgtcagccagccgtccagggaggcctcgaccatcagttgcagctctcgtgccccgatcactttgccggacggcgggataacggtctcaccggccacgaacggcttgctcgccaatgcgaccttggcgtattgctcgacgagcttgctgatttcctggcggagcatatcgggtgtcatgaaaattcctgctaaaaaatagagttagttgctgttggcacgcatggcgagcatgtaggcgtcgatttcatccaggcaatgggcctgcatgtcgttgccgctcaaccaggcacgatgccaggtaacaatccgggcgagcgtggttgcaaggttccagctgggtgtccagtgcaggtgcgcgcgcgccttggaaatgtccagcttgaggtagttggcctcatgcggctgcgggtcctggtccaattgccaactggcccctgtgccccaggcctgaaccatgtgatcaaggatccattccaccgggcgtgcgtcttcatccttggggccgaaattccagccctgggcaaagtgatgcccttgggtccagaggtgttcagccaacacaaggtatccactgagtggctccagcacgtgttgccacggccgggtggccttcggattgcgtattgtgacgggctgacccttctcgaaggcacccagaatatcaggtatcagccggtcttctgcccaatcgccgccgccaatcacattgcccgccctgccggatgccaacgctgcgccttgcggatggttgaaaaacgacttgcggtaggcgcttgtgatcagctccacacagcctttgctgttgctgtagggatcatggccgcccatgggttcgtcttcacgatagccccattcccactcacggttctcgtagcatttgtcggtggtgacgttgacgatagcccgcaggttgggacattgccgcgcagcctccagtacgtgcaggctgcccatcacattggtggcgtaggtctcgaccggctcgcggtaagacaaacggaccaatggttgcgccgccatgtgaatcagcacgtcgggattaaagcgcgtcatgctttgggtgatggccgccaggtcgcgaatgtcgccctgctccgactccatgccttcggccaccctggcctcgacgaacagggcagggtgggttggcggcgccagggcaaagcccttcacctgtgcgcccatgctggtcagccagagtgacagccaactacccttgaacccggtgtggccggtcacgaagactcttttgccttgccaaaaggcaggagaaacggtcgacttcatattcagtcccaggatttccagggcgctttgccggactgccaaagctcttccagatagtgtttgtcacgcagtgtgtccatgggctgccagaaccccgggtgttcgtaagccatgagctggccttcggcggcaagcttcatcagcggctcctgttcccaggtggtgctgtcatcctccaggtatttgagcactgcggggctcaagacaaagaaaccaccattgatcagggcaccatcacccttgggtttctccttgaagttcagcacttggcctttctggatatccagcgcgccaaaacggccgggcgggaacgttgcagtgagcgtcgccgctttgccgtgcgacttgtggaaggccagggtcgcgccgatatcaagatcgctgacgccatcaccgtaggtaaagcaaaaggcttcttcgtctttgacgtagtcggcgacgcgacgcaggcgaccaccggtcatggactcgtcgccggtatcgaccagggtgatgttccagtcttcggcgcgttggtcgtgcaccttcatggtgttgtcgcgcatattgaaggtgacatcggacatgtgcaggaaatagttggcgaagtattccttgatcacataccccttgtagccacagcagataatgaagtcattgatgccgtgcgcggagtacatcttcaggatgtgccagagaataggtttgccgccaatctcgaccatgggttttgggcgtacgctggtttcttcgcttagccgcgttcccaggccaccggccaaaataactgctttcatgctgtctccgggtcaattcgagcttacaaaggcgtcagaatggaaatgtttgaggggcaggccagcctgcgtcagcagctcgcgtgcggcgtggatcatggcttctgagccacaggcatagaccgaggtatcggccaggtcaagactttctgcaaggacggcctgttgaacgtagcctgttgcaccgggccattgtgtatccgcacgtgagagcacggggcggtaggtcaggcccagcgatggaaaatcaggctgccagtacaagtcctgctccgtacggccgccccagtacacgtaaatgcgtttgccgctgagtgtttccggtgcgtcactcaagccttcaagcatggctttgaccggggcgattccggttccggttgccatgaacaccaggttcgtcgtgcttgcactgcgcaagcagaaggtgcccagcgggccttccagcctgagcaggtcattggcttgggctccgccaaaccagtactggctcatcacgccatcgggtacttggcggatatgcagttccagcttgccatcctcacgcacggcattggcgatggagtaactacgtcgcacaccgtctttgcctatgacgtcgatgtactgccccggaaggtagaagagtgcgctttttggaggcgttcggaggacaacccttagtacgtcgtccgccaggcgctccagggtatcgaggcggcaaggcatggttttgatctggatgtcggccagcaatcccaggtcttcgatgtccaactcgacatcggtgacggcggcccggcagcacgtcaggatggaaccgcaggcacgctcttcttccgtcagcgcgagttccggttgcaccacctctgtatcgccttgaagcacgttggccttgcacacgccacaacggcccgtacggcaactgtattccagcactgtgccttgggacttggcgcaatccagaaggctcttgccaggttcagccgtaaacgtcttgtggttcgacaatgtaacaatcgacatgcgtcaggcaccatgctcagggttggcgtcgcaaggattcgactcgtccactggagtgcgagggacggccgccatcggcccgatacttttgatacccatgtacgtatacatctcctgtcgtcattgccctgaaagtcatacgacattcagcgcgcagactacgcccctggccggggtcatttttcgtagagtttaaagcggatagaagccgctggcggaaggccccaccagttgaatcgcatatacaactcgcagcaacatcgcagcgtgttgctgattattgaataacggactgcctattgatggcggcaattctacctgcttgggaccgtaactggaaatgcaggatatccggggcctgcccaggccgtttcactggcattgagtgggcgggtcatacgctgttaccgatccgtttttgactccttccaaacatcacctaagtttgaaatgcagcttaggaaagctgcatttcctttatcgatgtcatggagtgtcaccaatgcaaaacgcctatatcgcctccttaatcttcgccttcctcaccaccctctctgtcaccaccaccgcagcgccctccgtcaaaaccgaggctccaatcccgatcacgacccaaatgtccaaggcagagcaatccgccaaggtcaatctgaacgccgccgatgccgaaaccctgcgtcgtgacctctttggcatcggcgccgccaaggccaaggcgatcatcgcctaccgcgagagcaatggtccgttcactgctgttgatgaactactggaggtgaagggcataggcaaggcgctgctggagaagaaccgcgaaaggattgtaatcaactgagcacaggacggccggtcaccgaccggccattccatcatccgaaacctgtgccttcaggctttcccttactacgtccagaatacgcaccgccagcgctgcgctttcgacacttctggccagcgccaatgcgcccactagcgtcgacatcattaccaggctttcttcatcggcattcgtgctaatcagcgtcgcttccacctgctgcaagcgcgccctcagtaccgcgtccgtggtcggactctgctggcccctcaaccccaactccgagcacatggtaggcaatgggcaaccctgatccggcgaggctcgatgccattcagataagtaactatcaataaatgcctcaagagggcgttcctggctgaacaacatttcgcaatgcgcatccagctcggcagctgcggcttgcagcgccttttctaccagttcgtccttggatttgaagtgggcatagaacccgccatgcgtcaggtccagagccttcatcaagggctgcagaccggtcgcgccgatcccgtcgcgacgaaagcgtacagaggcttccttgatgatgcgttggtgggtcttggctttgtggtcggatgagtaacgcataggtgggcctcagtgacaggctggcattttaaccaacttgaatctttttacacgctgacacgttggcatgaaaagtggttacctacccatcgaagattgttcaacaatcatgaaggtagccatgacactcagtttgtctctcgccgaccagattgccctggagcttcgcgctgacatcatcggcgggcgactgctgccaggaatgcctttggtcgaagtagaactggtcaaagcctacaacgcatcgcgcaacacgatccgtgaagcgttgcaccgcctcgggcaagaagggttgacccgttatgtgcgcaacaagggggtgatggtccggcggttggcgcgagaggaggtgcgtgatttgtttgtcgtgcgccgcaccctagagttgcaggccatcgctcagagcggtcccctgacggaggatcaatccgaacgcatgcaaaacgccatcgacgccaccaccctggcccgcgagcgcgaagactggcgtgctgtcgccacccatagcttggtgtttcaccagcacatcgtcgggttgatgcgcagcccgttgttcgatgagttttttgcccaggtcatcgctcaactgcgcttggtgttttgcgctgcgcctgatgagcagcgttttcagtcgccgtggctggagcgtgatcgtgatatctacacattattggtcgagcaggataaatcggcggcgggggaggcgatgagcctgtacctggatgattcggaacgcctgtccctggccttgtttaaccacccctgatcgaggatctgcaccatgtacaaagactatccggccgcttatcaggtcagtaaaggttcggcgttgcaggtcgacacagcgttttacgagcgcatccgtgatcgaaaagaccagcgcacgctgatcgagcagtttgaggtgccgattcgtacgggcagggcgtggaaggtgccagccgggcatgtgttccgtgtgaccacgccggttggcccgcaggtgggtgatttcaacgtatggaatgccaatgacccccgtgagcgcctgtgggcggcgcgtacccgccaattgcagggcgcccatgtcagcacccatgaccgcttgtggtcgaatttgccattcctgcggcctttggtgacgatcacggatgacagcctggccagctacgggatcgatgagcacggcgggcggctgcatgatttgcttggcacacgttgtgatccctatgttaatcggatgctcaccggtgaggacttccatcaccattgccactccaacctgacacgtgcggttttgccccacggactgacggaattcgacgtgcatgacgtgctgaatattttccagtgcactggtctcaatcacgacgacatgtacttcatgaaggcctgccctgcacagaagggcgactacctggagttctttgccgagattgatttgctgtgcgcgctgtctacgtgccccggtggggatttgtcgctgccgatgtgggggccggaggcgcaggacccgctgacggtgtgccgtccgctgggggttgagatctacacgttggaggatgagttgctcaatggctggcgccagccggaacgtgctgcctacaaggggcagcacgggttgcatattgccaaggcggattgggagtaacccaaggctcagcgatcctgcgcatccttggcatccgcctgggcgttgcgctcggccacacgcttgcgttgttcgtcggtgagttcaactttgttggcgctgtcacgcagcatcatcagcccaccgacgatcgacccgatcgcaactaccataatcaaccacgcataccacggcataaggctctccttgaggcagattgccgtgggagagttttcccacggtaataactgctttgagtgacgggctttcttactagttcagtgtaggcccgttctgcctcgtagtagatcagagcccggtcaacatcgcatccgccggtgcatcggcacggtcttgcgcagtcatctggaagtaggcgaaccccaccaccataaagcccaggaagatcagcccgatcagcgtgttgaaccaagccatggccaccaggcacaccaccgccagcaccagtgctatgcccggcacgatggggtaacccggtgcacggaaggtgcgctccagcagcggttcggtcttgcgcagtttgaacaggctgagcatgctcatgatgtacatcacgatggcgccgaataccgccatggtgatcatcgccgcggtcagtgtcatgccacccaggttgatcaggccgtcgctgtagatcgccgcgatgccgatcacgccgccggcgatgattgcacggtggggggtctgaaaacgtgacagtttggcgaggaaagacggcaggtaaccggcgcgggccagggcgaagaactggcgcgagtagcccaggatgatgccgtggaaactggccaccaggccgaacaggccgatccacaccagcatgtgcaaccagccggagctgtcgccgaccacggttttcatggcttgtggcagtgggtcgttgatgttcgacagggtgcgccagtcacccacgccgccggcgaagaacatcacgcccatggccaggatcaccagggtcaggatgccgctgatgtaggcctttggaatggtgcgcttggggtctttggcttcttcggcggccatcgcggcgccttcgatggcgaggaagaaccagatggcgaagggaatcgcggcaaacatgccggcaatcgccggtgcgccaaaagtatcggaaccggcccagccattcagggcaaagttactgaagctgaaggcgggtgccactacgcccatgaacaccagcaattcagcgacggcgagcacgcacaccaccagttcgaaggtggcggcgagcttaacgccgaggatgttcaggcccatgaacacgatgtaggcaccgacggccgcgtgtttggggtccagcgccgggaactgcacattcagataggcgccgatggccaaggcgatggcaggcggcgcaaagacgaattcgatcaaggtcgcgagccccgcgatcaagccgcctttctctccaaaggcacgacggctgtaggcaaacggcccacccgcatgaggaatggcggtggtcagttcggtgaagctgaagatgaaacaggtgtacatcgcggcaaccatcaatgaggtcaccaggaagcccagggtcccggcgacgccccagccatagctccagccgaagtactccccggatatcaccagcccgaccgcgatgccccataagtgcagggtgcccaaggtgggtttgagttgtgtgttcatcgtgatgcgctccctgaacggtttggaatgattcaaggtgttgcagcggacatgccatgcctcacaaccgtgtcgtaaagcggcgcaactgtcgtctgggagatggtttggcgtttgaaattttccggtgtcgcaccagataagtgcgcgggtggctggcagggcctcatcgggggcaagccccctcccacacttggcctgcgtagaccggtcaacatgtgggagggggcttgcccccgatggggccctccaatccagcacaaccctccctgtaaaccccgcataaacccactctttacgccgtctttacgccccgcccacaccctcgctctcgttcctttacgccactcctgccgacaattgccccacacgcggcactcgccgctaaacggagagacttccatgagcgttctggacggggtgtcactgctattggccgtggcgctgttcatttatctgctggttgcgctgttacgcgcggatcggaactaggagctggccatgcacagttatgactattggctgatcattgccttctttgccgtggtgctggtgccggccccgttcctggggcggttctattacaaagtgatggaggggcagcgcacctggctcacaccggtgttcggccctgtggaacgcgcctgttatcgcctgtcgggcgtggatgagcatcaggaacagagctggcagaagtacatgctggcgttgctcgctttcaaccttgcgggctttttgctgttgttcgcgatcttgttgttccaggactacctcccactgaacccgcagaaattgccggggcaggaatggacgctggcgttcaacactgcagtcagtttcatgaccaacaccaactggcagtcctacagcggtgaagcgtcactgagctacctcagccagatggccggcctgaccgtgcagaacttcgtcagcgcggcgaccggtctggccgtccttgtcgctttgtgtcgtgggatcggtcgcaaatccaccaagacattgggcaacttctgggtcgacatgacccgcgccaccctctacggcttgctgccgttgtgcctggtgctggcgttgttcctggtgtggcagggcgtcccccagaccttcgcccattacgtggatgccgtgaccctgcagggtgtggatcaagtgatccccctgggcccggcggccagccagattgcgatcaagcaattgggcaccaacggcggtggcttcttcggtgtcaactcggcgcatccgtttgaagaccctaccgcttgggcaaacttgttcgaagtggcgtcaattatcctgatccccgtggcgctggtgttcaccttcggccactacgtgaaggacctgcgtcagagccgcgcaatcctcggctgcatgctggcgttgttcatcatcggcggcgcgacctcgctgtgggccgaataccagcccaacccgaccctgaacaacccggccgtggagcagactgcgccactggaaggcaaggaggcacgcttcggtaccaccggcacggtgctgtggtcggtgaccacgacagcggcgtccaacggctcggtcaacggcatgcaggacagcctgagccctctcagtggcatggtcgcgctggtcaacatgatggtcggcgaagtgatcttcggcggcgtcggcgctggcatgtacggcatgttactcaacgtgttgattgcagtgttcctcgccggcctgatgattggccgcaccccggaatacctgggcaagaagctgcaggccaaagaagtgcaattgctggtggtgaccttgctggtgatgccggtgggcgttctggtgctcggcgccattgccgccagcctgcctggcccggccggcgcgatcagcaaccctggcccccacggtttcagccagttgctctacgcctacacctcggccagtgccaacaacggctcggcgttcggtggcttcagcgccaacaccccgttccacaacctgatgctgggcctgggcatgttgatcggccgcttcggctacatcctcccggtactggccctggccggtagcctggcgatgaagaagaccgcaccgattggccagaacagcttcccgacccatggcccgctgttcgtgaccctgttgaccgtgaccattctgctggtgggcggcctgaccttcctgccgacgctggcactgggccctatcgctgaacatctgagcatgggcttctaaggggatatgaaaatgaatatgcctgcaaaaaacgcagctcctgccaaaacccaggagcctgccaaaaccgccatctccgccctgtggcgcccggcgctggtccaggcgttcgtcaagctggacccgcgccagctgcaacgctcgccggtgatgctggtggtcgagttgaccgccatcctcaccaccgtgttgtgctttgtgcccgacaccgccgtgccgacctatgtcgccgtgcagatcgccgtgtggctgtggttcaccgtgctgttcgccaacttcgccgaagccttggccgaaggacgtggcaaggcccgcgctgacagcctcaaggccggcagcgaaggcctcagcgcacggcgcaaggaggccgatggcagcttcaaggtcgtgccggccaccagcctgcgcaaaggtgatgtggtgcgtgtcgccgccggggaaatgatccccggtgacggcgaagtcatcgaaggcatcgcggcggtcaacgaagcggccattaccggtgagtcggcaccggtgatccgcgagtccggcggcgaccgttcggcggtcaccggcaacacacgcctggtgtcggactggctgctgatccgcatcaccgccaacccgggcgagtcgaccctggaccgcatgatcgccctggtggaaggggccaagcgccagaaaacccccaacgaagtggcgctggacattctgctgatcggcctgaccctgatcttcctgttggtggtggtaaccctgcagccgttcgcccatttcgccagcggcagcttgccgttggtgttcctggtcgcactgctggtgacgctgattcctacaactattggcggattgctgtcggccatcggcatcgccggtatggaccgtctggtgcgcctcaacgtgatcgccaagtccgggcgtgccgtggaagctgcgggcgacgtgcatgtgttgctgctggacaagaccggcaccatcactttcggtaaccgtcgctgtgcggcagtggtcgcggcgcctggcgtcagcggcaaggaagtggccgagggcgcgttgtttgcctccctggcggatgacacggcggaaggtaaatccatcgtcgaatacctgcgcgccttgcaccctcaagccgagccgagcgcagacgaactgacggccgtgccgttcagtgctgaaacccgcttgtccggtgtcgactaccagggccgtgtgttccgcaaaggcgcggtggattcgctgctggccttcatcggtcaacaacgtcgcgacttgcagcctgcgctgtcgcgggaaatcgacaagatcgcccagagcggcggcaccccgttgctggtgtgtgccgacggcaagttgctcggcgcgatccacctgaaggacgtggtcaagccgggcattcgcgagcgtttcgccgagctgcgcaaactggggatccgtaccgtgatggtcaccggcgacaacccgttgaccgccgccgcgattgccgccgaagccggcgtggatgacgtactggccgaagccacccccgagaaaaaactcgcccgcatccgtcatgagcaaaatgacggccgcctggtggcgatgtgcggcgacggtgccaacgacgctccggcgctggcccaggcggatgtcggcatggcgatgaacgatggtacccaggctgcgcgcgaggccgccaacatggtcgacctcgacagcgacccgaccaagctgctcgacgtggtgcagatcggcaaggaattgctggtgacccgtggcgcattgaccaccttttccatcgccaacgacgtggccaagtacttcgcgatcctgccggcgctgttcgcctcgatctacccgcaactgggcgtgctcaacgtgatgcacttgcagagcccgcagagcgcgatcctttcggccatcgtgttcaacgcgctgatcatcgtggtgctgattcccctggcgctgcgcggtgtgcgcgtccaggcggcgagtgcggcggcattgctgcggcgcaacctgctgatctacgggctgggcgggattctggtgccgttcgtgggcatcaaggcgatcgacatgctgctgactgcgttgcacctggtttgacccgattcctgtgggcgcccggcgggtgcccacaggttgcaatgaccgaattgaggaatccgaaatgtccaacatgatccgcccggccctgagcctgctggtgctcatgaccctgattaccggcgtcgcttacccactggtggtgaccggtgtcgcccaagtggctttcccggaccaggccaatggcagcctggtacgcgatgacagcggcaaggtgcgtggctccagcctgatcgcccaggattttaccggtgacaactggtttcacccgcgcccctcggctggcgcttttgcgacggtctccagcagtgccagtaaccttggtccaagcaacccggcgctggcgacgcgtatcttcgatgacgcgagtaaacagctggtgccgagccaggggccggtgcctctggtatcgctgactacctctggcagcggtcttgatccacacttgccaccacaggcgattgcctatcaactggcgcgggtggcggcggcgcggaatgtgccggtgtcgaccttgcagcgcttgctcgatgaacacatcgaaagcccgctggtgggcccgccggtggtgaatgtgctggcgctgaacatggccctggaaaagttgtaggccgtggcgcagccatcgcaggcaagccagctcccacaggggaatgcattccaaatgtgggagtgggcttgcccgcgatggcggcctgaggcgcaaccaataaacatctgaaggaaccccgagcatgagcgactccggccgcgccgatgccctgttagccgatctgccccgggacggccgtggccggctcaaagttttcctcggcgctgcgccgggcgtgggcaagacctacgccatgctccaggccgcgcacacgcagttgcgccaaggcgtgcgcctggttgccggcgtggtcgaaacccacggccgcgccgagaccgaagccttgctcagcggcctgccgcagcaaccattgctgcgcagtgaataccgtggcgtgatgctcgaagaaatggacctggacggcctgctcgccgccaagcccaagctggtgctggtggacgaactggcccacagcaacgcccccggtagccgtcacgaaaagcgctggcaagacatccaggaactgctcgccgccggcatcaacgtgtttaccacggtcaacgtccagcatctggaaagcctcaacgaccaggtgcgcggcatcaccggcgtgcaggtgcgtgaaaccctgccggactgggtgctgcaagaggccgacgaactgctgctgatcgacctgccgtcccgcgagctgttggagcgcctgcgcgacggtaaggtctatgtgccggagcaggcgcgtgcggccatcgatgcgttcttcacccagaccaacctcatggccctgcgcgagttggcgatgcagaccgccgccgcccacgtcgatgacgatttggcccaaggctatcgccagctcggccaggctgcgccggcggtgcgtgggcgtttgctggtcggcgtggatggtgatgcgcaggccgagcgcctggtgcgtcatgccagtcgcgtcgcccagcgccgccatttgccgtggagcctggtgcatatcgataacggtcgtgcgcgggacgaacagtcgcggctgcgcctgcaaaatgcccagcagttggccgagcgcctgggcggcgaggtggtattgctgcgcgcaggggaggtggccaagacactgatccagcacgccgccgaacgccgcgccagcctgctgctggtggggcagtcgcgcatgcgttggcgccgtcgcttgttcggcggcggcctggctgcgcgtttgctgcgtaatgcgcggggcttggaaatcaacgtcctcgacagtgacgacatgcctgcgccgccacgcttgccggatgtacgtgggctggtgtggttcgactatgcgctggcagttgtggcaacggtggcggcggcggcggtggcctgggccgtgtccagcgccttgccgttgccgaacatttcgttggtgttcctcgctgcggtgttgctggtggcggtgcgcagcagcctggggccgtcgctgatgtgtgcggcgctgtcgttcctgacctacgacttcctgtttatcccgccgaatttttccttcgccatccaacgtgaagaagacgtactgaccctgttgttcttcctgttgatggcggcgttgaccggcaacctggctgcgcgccagcgccgtcagttgcaggcgttgcgcgacacccaggaagaaaccagcgagctgctcgacctgtcgcgcaaactcaccgccgccactgatcgccaggcggtaatcagtgctgccgcgcatcacctggagggctggagcgacctggacctgtgccttgtcaatcgcgatggccagggcggttgggccatcgagacgggcggcccgctgaccctgactgaagctgagcgtgccgccgccgattgggcctggcaacatgaccaaccagcgggcatgggcaccggaaccctgccgttcgggcgttggtggtggtggccgttgtcgggcgaagaaggcccgttgggtttgctcggggtcagccccaaacccggcctggaattgagcgggcaacgccgtcgtctgctcactgccttgagccaaccgctggcccaggcgctggcgcgggcgcaactggcccaggagttggagtctgcacggttgcacggcgaaaccgagcaattgcgcagcgccttgctggcgtcggtatcccatgatttgcgcacgccgctgacctccatgcgtggcagcatcgacagcctgctggcgctcggtgaggccatcccgctggaggaccgccgcgagttgctcgaaggcacccgcgatgaggctgaacgtctcgaccgttacatccagaacctgctggacatgacccgcctcggtcacggcgctttgaagctggcgcgcgattgggtgtcgccgggtgatatcgtcggcagcgccctcggccgtctgcgtgcgatgctggcgccgttgcaggtgagtaccgaagtgccgcccgagttgccgttgttatatgtgcacgccgcgctgatcgagcaggcgctggtcaatgtgttggaaaacgccgcacgtttttcgccgccgcaagggcgcttgcaactgagcgccggcgttgccgataaccagttgttcttcgccgtggctgacgaaggccccggtattcccgaggatgagcgcgcaaagatcttcgatatgttctacaccgcagcacgcggtgatcgaggcgggcagggcacggggctgggcctcgcaatttgccagggcatggtcggcgctcacggtgggcatatcagcgtggccgacggcattgacgggcgtggcacctgcatcaccttgttcctgcctttaccgacacagcctggcctggagcgcgaggcatgagctaccctgttttcttcacggattttgattggaagccatgagccagaccgcgacgattttggtcattgatgacgaaccgcagatccgcaaattcctgcgtatcagcctggcctcccagggctacaaagtgattgaggccggcactggcaacgaaggcctggcccaggcagcgttgaacaaaccggacttgttggtcctcgaccttggcctgccggacatggacggccagcaggtgctacgtgaatttcgcgagtggtcgacggtgccggtgctggtgctgtcggtgcgggccagcgaggggcaaaaggtcgaggccctggatggtggtgcgaatgactatgtgaccaaacccttcggtatccaggaattcctggcccgggtgcgggcgctgctgcgtcaggcgccagcgggtgaggcccaggaagcagccttgcgttttggcccgctgacggtggacctggcctatcgccgggtgctgctggacggcgccgaagtggcgctgacgcgtaaggaatacgcagtgctggcgcaactggcgcggcatccggggcgagtgattacccagcaacagttgctcaaggatatctgggggccgacccataccgaggacagccactacctgcgcatcgtcgtggggcacctgcgtcagaagctggcggatgacccgacccagccacggtttatcgtgaccgaggcgggagtggggtatcggttattgggcggatagatagacctcaggcgcgctctgtggcgagcgggcttgttgtggcgagcccgctcgccacaacggctttagtgacacgtctgtttcagcgttgctcactttcataacggtccagcgtatcactggcaatttcccgccccagggcgatcaactccggcgctttgtagaactcgaaaaaccggcacacccgcttcggcacgttgatcagcacgtctggcgggtagcccgcgatcttgtactgcgccagcgacgtctgcatcacctcgaagctctggttgatcaggtccagcagcgaagccgggccgacgttatcgatgatgaacgacccggttgccgacttcggtgcgccgggcttttccggtgccgcggcgggttgttgggattccggctcggcagattccagccacgggttgatctccgccgcctgcgcttccaacgcctcctgctccagtttcatcagttgttcggcctgcttgcggcgaaagggcaggtgcgaaccgagtgatctcgccaggttgttgaagcggctcttgaacgcgggtgggcgttggatcaccggcaactggtagtgcttctgattggtggcgttgaggttgaccgcgatgatcaagtcacagtggctcgacaccaccggtacgatgggcagcgggttgagcaggccgccgtccaccagcatgcggttgccttgcatcactggggtgaacaggctggggatcgccgccgaggcgcgcatggcttggtgcaggcagccttcctggaaccagatttcctgctggttggtgaggtcggtggcgacggcggtgtaggggatgcgcagttcttcgatgttgatctcgccgacgatcttgcggatctgcccgaagactttctcgccgcgaatggcgcccaggcggaagctcacgtcgaccaggcgcaacacgtcgaggtagtcgaggctttcaatccagtttcgatactcgtccagcttgccggcggcgtaaatgccgcccactacggcccccattgaacagccggcgatacaggcgatatcgtagccgcgccgttcgatttcctcgatcaccccgatatgagcgtacccccgggcgccaccggagcccagcaccaacgcaacacgtttcttcatggtccatgtcctccccaaggcaggtccccacaatgcacccatgagaggccggcttcaatattcgtgggagcctgcaatatttttccagaatagcggtgttgctcgggtatgctctggtcaataggcactaccgatttcaggctaaggacaggcacttttccctgtaggcaacgtctacaacgtacgactgttttttcttttttgaggtgtcatcgatgaaagcctggatgtgtgtgcctgtgatcgtgttggccctggccggttgcgccgggaaaaccgcataccgcgacagctgcggcagccagttggacgccgcctggaaagaactggacctggctaaggctgaaggctttgccggtaccgtgagctactctaaggcactgtctttgttgacgggcgccaagacccagcaacagtttgaagcgtttgaaggctgctccaacaaggccgagaaagcgcgtttctatattcgtgagtctcgcgccgggcgttgacctgcagcgagtaggatttttcatcaggtagtgagggcaggatgtcagctttggtcgatcagttagtcgctcaggtcattggcctggaagtagggttactgagctgccaggctcgccttgccgccgtcaccgatgatgaagccctacatgacctgcgcaccaccgtgcgccgtctgcgcagcctgttgcggcccttgcgcgggttgccaggggtggagcagcttgaagtggcggccagcacggtcggccaattgaccacgccgctacgcgaccgcgaggtgctggcggcgtatttgcaccagcatggccatcatgaggccgcaaaccgacgactgtgcctgcaacccgaagcctatcgtcaggtggcgcaaagcccggaacttgcgcacttgctgctgatcctcgacgccttcccgcgtttcctccgtgcttctgaacaccagaaattgctcaaaggcctgcgaccacgcatcgaaaagcgtctggccaagcaatggcagacactcgataaggccttgaaggaaccgggccatgatcgccaccgcctgcgcttgctgatcaaacgcgtgcgctacgctgcagaagcctatcccgaattggacaagttgcccgccaaggccatgtcgcacctgaaaaaagcccagggcgcccttggggattggcatgattgctggcagtggttggcccaggctgaacaccaggcagatctgcaaccttgtgttgccgtatggcatcgcaccatggccaaggcgcaggggcaggcggaccgcgtgctggataaactcagtgctgattgtttctgaaccggtccggtttttggccggaataggcgctgtacctgattggtccgatggttaagatccctcatctgttccttttgatgtgagaccgccatgcgctttagtgatttgctcgacgccgcccgcagcaacccgctggatgtgaccatccccgctgagtgggcccagggccgtgcgacctttggcggcctggtcgccgcattgcaatacgaagccctgcgtgcccaagtgcccgcggatcgtcctttacggtcgttggcaatcacctttgttggcccggtagcgccggacgtccccgccagttatcaagtcgaagtgttgcgtgaaggcaaagctgtcagccaattgcttggccgcgtggtgcagaacggtgaagtgacgacactggtacaggccagtttcggtggggcccgtgagtcggaaattgcggtcgaaagcaaagcgcctccggtgttcaaacattgggatgagtgccaggaactgccctatatcaagggcgtcactccggagttcatgcgccatctggcgatgcgttggagtgtcggcggcttaccctttaccggtaacaaatcccgcgacatgggcggttgggtacggttgcgcggcgatgtgaaagaagaaccgctgaccgaagcgcatatccttgccctagtcgacgcctggcccccggcgttgctgccgcacctgaaaaagccggcgccgggcagcaccctgacctggaccatcgaattcatccagccattacaagacctcacgaccctcgactggtgccagtattacgtcaatatcgagcacgcccgcgacggctacggccatgccgccgccgccctgtggagcccgaccggcgcactcatcgccatcagccgccagaccgtggtggtcttcgcctgacctcaatgctggtggcgctgccgccaggcacgccaccagccaccgctcaacacaaaacgtggaaaggtcacgaactgctcgaccatcaggcgctggaccgaatctttacgatcactgaacggctcactggcctcggcctccaggctatgcccatgacgctgcaacgccaggccggccaagataccgaccacaccgacggcaaagctggccagactcaggctgaacaccccggacacaatcaacagaaacccgatgatgaacagcggcacggcaatcaggtgcaacgccaggttggtcgggtgctgatggttctgcgggtagtgacgccattgccaggcggggagattggggtgacgtttgcccatgatggtgaatcctctgtccgttgaaacaacttgaacagagtttaggtggggggggggcggggcggcgaattggggttggctatggggctcatagagggtagttttgggcatgtccccgtgatgcccaaataacgcattaatggtggtccatgtgcatcaagaacgtgaggttgttatcggctatccagactagatatccggacctctcacccagaaccgttgcaatatcttgtgcatcatggattttccaagccttgtatgcgaaatcgaacaccactaaaaccagattttctcggctaatacgattctgtatgttctgaaaaaattagggttgtgctctgtgcttttttcatccgattcgactgggtcgagtacattactttctgtcttgaaatactgctttgccagatagttaatcgaagtggtaagtttagtcgatttaattttttggcgcgtatatttaaagtttcgaatgaaaggtctatctttttttcgagataatacatcagatagcgccgcctaggggtattcttggggggttgtatattggttttgagttatttgaaataatagtcgtctggatcgttgatgtaaacagttggtccgctaagtgaaatgaattttgcgttgaactctatggatgcattgtcgctggtagcttcaaaagtaaagtagtccatttttttattgattgttacggtaaataactcatgtgctgggatgttaaagactttcaggttttcaatgtcgttgcaggttatcccaagtctgcacatgttataccctttgtttttccatttttctggcagtttgtctggaaattcggggatgtcgaatcctatcccaacacaaggttgatcattttctacccttaatgagaaaagggctatttttccaatttcaacaggaaggctgaaaattttactgaggagtatactgccctctaactcgttccagtatttcattttttatttcctgaatggatagtgtttttttgcgccttcaatataaccttttcggggtttttcgattggtcgcaaattaaagtgcgctgaatggtctccaataccgtctacgcttccgtatttatggcctgctgagtggtcttggataaggattttcgagccgtttgctcttgtgaattgatagacttttgtgtttatgggtttgccgttttcatccaaaattgttttcctattcttgtctgtcattttttcagccgtgtattgttttgcctttcctgtgtctgggtctattaccatgtctggagtctgaaccatcggtatcccagcatctcttttcgcttgtctgaaggcgcctcggcgagaaacatcaggtgtttccggttcattctgtgttttacaggctggctgttgtatccctttcggcggacaattggcgctcagccctgtcgcatccacccagccagtagggttgggcacgtacaggtacgtgttaattccacccgccaacttcaccggatccggcgtcaggtaccgacccacatccggattgtagtagcgatgacggttgtagtgcagcccgctttcctgatcgaaatactgaccctggaaacgcagcgggttgtcgacttttctgatgtcgaggcgggtgatttccccgtaggcgcggtaatgcgcggaccagacgatttcgccatccggggcggtgagttcctgtggggtgccgaggtggtcgagttggtagtggtaggccttggtttccttggggccgaagccttccagcagcgccagcggacggaagctgtccggttcatagagatagctgcggtgccgatccgcgtggtgttcggcgatgagtttgtcgccttgccagaagaactcagtggttacaccgtcgacggttttactgatacgccgcccaaacgggtcgtagcggtagctggcggtctggccgttgggttttttaataccgatcagacggtgctggcagtcgtagcggtattcggtgacgagtacgtggcctttgccgcggcgttcgcgaatcaggttgccgaaggcgtcgtagtcatagtggtggtcgccctgaatcatcaggcggttgccggcgacgatgtccgggccggggcggttgtgcatcagcaggttgccggccgggtcgtggccgaagcgctcctgttcgtcttgggagtggtcggcgcgggtgaggcggttgagtgggtcgtagtggtagcggtgttcgcctttgcgggtgtcgagcaggcgggtgaggttgccggatttgtcgtagtcgtagtggcgtctgtacaccgggccttcggcgtcattgatgctctggttgaacaggcgtccctggtggtcgtgttgatagcggctgagcagttggccttgttggcgttgctgttcgcggccggccttgaacaggtgtgaggtgagtaccgcgccgttcagttcgacggtggcgaggtggccgcctttgtcgtgagtgaaggtgaggcggttgttgtccggcaggcgcaggttttgcaattggccgcaggcgtcgtagccgtagcgcagggtgccccagccttggtgttcggtggtgaggcggttttggctgtcgtactcgtaggccagggaccagtggccgtcttcgacgcttaggagattgccctggcggtcgtaggcgtaatcgacggtattgccatcgggcagggtttttctgacgaggcgtccggcgtaatcgcgctggtagcgggtaaccaactgactgccgtcatcgccgtgttcggtcttttccgaaaggttgccattaaggtcgtaaacgtaagcggtgcgctggccgtcaaacccggtttcctgctggatcaggccgttgttgtggtactggagccggtaggtctcgccaacttcgttttcgatttcggtcagcagtaaccgcgcgttgtcgtagcggtagttgacctggctgccatcggcattgatacggcggctgatcaggtgcaggccgtcggcgtattcgtagcgggtgacgtgcccgagttcatcgcgctcggcggtgatttttccgtaggggttgtagttgtattccctgaacccgtcgcctggcagcacaacacgaatcaaccgacccacgccgtcccactgatactgggtcagcgcgccatgttcatcctcacgcgcaatctgtcgtcccagatcgtcatagcgataacgcttgatcccaccattgggcaactgctcctcaagcaactgcccacgctcattccataccagccgctgacagctgtgatccggataccaaaccccaaccaactgtccgtatttgttgtaggtgtaatcggtaacgtgaccgtcaggatcgatcttgcgaatgacatcgccctggtcattgcgctcatacttccaaaccgctttaccacgccgcacaacccgtacgaacccgttgtcatgctcgtaggtcgtcggctcatcgtcccccggaaacaccgccaccaagcgcccggcttcgtcgtactgatacgcggtgatcgcccccagcggatcctgctcaacggtcagccggccttggtcatcgtaggatttgaaatgctcggccccgtcaggatcaacccgctgcaccagccgcgcccgctggtcatgtacgtagacttcctggctgccatcggcgttaaacaccgtgacctggccgttgtcatcccaggcatagcgcgtgtccatctgcgagaaactcgcccaatgccgcacacaccgcgccgtcttgccagaccgttcccattcccagaaaaagctcgccccaccggccaagccacgctcaagaatgacgtgctgttcgtcgtaccgataaacttcgctttcgccgacggcattggtcgctgaaaccagtcgtccaagctcgtcataggcgtaggaaacaaccgtctgctccgtcacccaaacaaacggcccctcatccacaacgcgatgaatctggtaatccaccgccacgatgcggcccgacgcataacgcaaaaacagcgagcgcccgacaccgttatccacccgctcaacacgccccagaaaatcccgggaaatacgcaggcggttgtcatacgcatcgctgatcgttgtcagcacaccgtcgcggaagtggtagaaacgtgatgcctgcgccagcaccagttcatcaggcaacgaccctaggtagatcgccgcttcggccaagctattggtgatcgcaggccgagaaaccgtgggcaagggcagggtggtcgaccgattctcatgatcggtccaaaccaccgaatccccggaaacactcaaccgatgcgccagcgagtgactccagccaaaccccaacccaccatccacttccaccgcactggtgcggtacaagcgagtccactcaaacggcaagatcccgtccagcgtcccatcggtgagggtcagcaactcctcgccggtgaccatcgacaccgggcagccgttggtggcggtcttgtcggaaggcgctgatgcatccccagccggattcttcgcaacagctggcacgtcatccacatgctcttgctgaaccaacacagttcgccgggacttgctgcgcaccgcaggcaccgcgttggcaaccacctgatccccagccttcaacggtgcatccggaactaccctgatcggcgtcgcggagctacccagcaacaccggcctggccgcctcgacatgcgcgtccaaccgaggcccgaccagttgatccgccagcatttgcagccatctacgcacgcgtccggacttgatgtgccccagcacctgcatacccaaacgaagctgaacccccatgccccgcgtggcccagatcagaaacagattgatcagtacctcgccggttatctcgcccagcagctcgtacatctgcggcggtggcagcatgcgtatccaggcaaccatggccgacaggtagataaacaacagcggctcatcgctgagcacaagcaggccctgggcaatggcgtccttgcccagtttcagcagttcatccaattcggcctgggagacgtattgcagcaacttcaggctgttactcttgaggtccgccagcaggtcgtacagttgtgtgaaattgtcccaaaggttgtagaacgccttgccgatcccggttgagagcgccaggccttgcattgcactgcgctcgaatggcgtggcgttggcaaagtcgtcccattgcggcttgaaggtctttttccattcatcacgcaggcccctttccagccccgcgatcaccgacagataagacgcatacagcgctttgatgtgatcattcgaaacgttgggataaaaggtgatctgatcgcgggcgcagtcgctgactgcaagaatgccgctggggccgatggtgcgatgaatcgacgggcccaccgggctgccatcaggggcgaccggttgcagcatcaccggcgtattgccgataggcacaaaccgcgtgctctcgaacatatgcaccagggtcaacgagccctgggccttgcaggtggcgaccgtgcgattcggtttcttggaggacgccggagcggcgagggaaacctcgtccccgaccttgaacacctgctcgacttccaatgccgaaccgctccagaagctttcggcccactcgtcaaaggtgttcaggcattcacgcaagtcacgcaggacgccttcaacgtccggcgccttggcatccatgggcgcgaggatgaaacgtgcaataacgggaatcatgaggcggccccgttgagtggggcacggctagagaggtgcatcggcggtccctcgcgctgattgatcaggcgagagactttggagaggttgccagggaaaagaagtcggcgttattcgccgagagggttaggacgtttcgccaaaacctcgggcaaaccgaggctttgttgtaggcagaggattacgggttgagcagtcctacagcttcaactgcccaatcgccttgctcagctccccggccagcgtggccagttcattgctggttgtcgccgagtccacggtttgctgcacggtgttctcggtcacatcccgaatgctcaccaccgcacggttcatctcttcggcgacgtggctttgctgctcggcagcgacggcgatctgggtgttgctttcacgcatctgcgccacggcgctggtgatttcggcgagggcggcaccggcttcctgggcttgttgcacgcagtcgtcagccttgaacgagctttcctgcatgaaatccactgcgtcacgggtgccggcttgcagcgccgagaccatgcgggtgatttcgtcggtagagctttgtacgcgtttggccaggttgcgcacttcgtcggcaaccacggcgaacccccggcccatttccccggcgcgcgcggcctcgatggcagcgttgagggcgagcaggttggtttgttcggcgatgctgtggatcacgctgaccacgccgttgattttctgactgtcctcggcgagcttctggatcatctcggcggtctgttgaacgcccgtggagaggccggcaatcgagcgttgtacgcgggtgaccacttcctggccgctgcccgccagggtgtcggcggtctgggacaggtcgcgggtggcgcccgcgtgctgggcgatgtggtagacggtggcggtcatttcgttgatggcagtggcggcctggtcggtttcgctctgctggccgagcatgccgtgctgcacatcgttcatgctgctggccaaccgtgcggcgccatcgtcgagttgctgggcggtgcgtgccacggtgttgaccacacgctggtagccggcttgcatggcgttgaacgcgctggccatctggccgacttcatccttgcaggccaacggcacgcgggccgacaggtcgccggttttctctacgtgcagcatcacgtctttcaaggtgttgagttggctgagcaggaagcggatcagcagttgcgaggcgccgagcatcgccagcatcaggatcaggactgccaccgcatagttggcaaagcgttcttcgaacacttggctcaggcttggcgcgtaggcgagcacggcgacgtattgaccgtcagggcgggcgatgacttcagcacccatcagcgggttctcaccgaacaacggcatatgattgagttcgacccagcccaggttgctgcccaggggcgacagatcctgctccgccagttgtgggacctggccgcgcttgaacgtcagccagtgctcgcccttgggcaaagcttcgccagtcggccacgcattgaacaaatgtgcctgcgcctgggccgaagccctggatgcatcgctgcgggactgttgctcaagctgcacggcatacagcaccagcagcagggtggtaatgaaggcgaccgcattgacggcccagaatttgtacttcagcgagatattgctaagccaggcacccatggaaggttttctctgatagcggaaacagcattggcaaggtgccattattgtgccgctatccaggaaaacggttttgacatgggtcaatgcgccgcatcaatccattgctggcaagccaaaaaagctgcgggcgcaggccgtgctgtgacgggccaggtcttccaagctctcgttgcggtgcagggcgacttcgcgcagcacttcaggtagatacgcgggctcgttgcgaccgtttttcggttttgggcgcaaggtgcgtggcagcaggtagggtgcgtcgctttccagcatcagacggccacggggaatttccctgaccagggggtgcaggtgtgtcccacggcgttcatcgcagatccagccggtgatgccgatgtgcaagtcgaggtcgaggtagctgaacagcgcctgttgttcgccggtgaagcagtgcaccacagcggcggtgagctggtcgcggtagtccttgaggatgtccagcaggcgctggttggcgtcacgttcgtggaggaataccggcaatttgagctcgacggccagggccagatgttcttcgaggactttttcctgctgcgggcgcggtgaaaaatcccggttgaaatccagcccgcattctcctactgcgcgtactcggttttctttcagcaaaccgcgcaaacgcgatgcgctatcgccgttccagtcaatggccgagtgggggtggatgcccgcggtgctgaacaggcgctggccgctttcatcgagtttttcgcactgcgccagggcctgttcgctgccctcgatgctggtcccggtgagcaccaattgttgcacgccggcagcataggcacgttcaagcacggcctggtgcttctcgtcgaaactggggttggtcaggttgacgccgatatcaatgagttgcatggtgctatctccgcctgcggccggaaagcatatcagagctgtagatttataagaaaaacgaagaactacaacgagttatagctgtctttgaacgtcgcaagcgacattgtggttggcccgccgcctgccaccatgccgccgttgcgtaccttgccagcgcataaagcgctctgtttctgacccccaccgcctcgtttttcgcgagggcgttggccagtattctttccggagagcggatgatccgaccctcggcgttgcttatgttgtgcctgacgatgctgctgcccatggcggcggttgcacgtctggacgggccgctggaagtgaccaggcccggcaaggtccgcgatttggcggagattcgttcaagccgcacgttgcgcgtcttggtcaaccagagccgtaacagttccggtgaggtacaaggccaggccatcggtgtcgaataccatcgcctgcgcgccttcgagcagtacctcaatggccatgcccgtgatggccaggaaatcaacctgaagatcattcccaaggccaaggaccagttgctcggcgcgctggcccgtggcgaaggcgatttggtggcgcccggtgaactgctcgatgtaaaggcggtgcacaagatcagcaccagcgacccgattgccagcgatgtgccgttgtggctggtgggggtgaagggcgagcgacggtttaccaagctggagcaactgtccggccgtaccctggcactgaccaccggcagtgcggcggcggatgccatcagccaggtcaaccagaagctcgccctgcacaagcagccgccggtcaaagtagagtgggtcgacccaacgctggctgtggaagatgtactggagatggttcaggccggtattttccacctgaccattgtcgaaaagccgattgccgagcgctggtcgaagatcctgcccaagttgcgtttcgataagcaggtggcgatcagcgagccgggcgacgaatactggttcgtgcgccaggatgcctcgatgctgcgggccagcattgaccgattcctcaagacctatcgaaccccgtccgaccaggatgtggcgttccagcgtatctaccgtcgcctttatcaagtgcgcaacccattggcccgcgtcgaccgacagcgcctggaaaaactacgcccggtcttgcagaaacacgcccgcgagcagggtatggactggttgaacctcgccgcactggccttcaaggaatcggcgcttgaccctggcgcgcgcaacagtggcggccccaccggcctgatgcagatcacgccatcggcggcgcaacgcgtgggggtcaacaatatcgaaagtctcgacagcaacgtgcaggccggcgcgcggtacctggcaatgatccgtcgcaagttcttcgccagccccaagctcaacgagcgcgagcgcatggcctttgtgctggcggcttacaacatggggccggagcgggtccagggcatgcgtactgaagccaagcggcggggactcaaccccaaccagtggttcttccaggttgaacgcattgccatggagcaagtagggatgggcggcgtcagctatgttaatagcgtcaacaagtacttcttggcgttcgatcgggagcgagcgtcccttgaaccgcaggcaccgaaaatcgcctcacgaaagtaatcgattttatcgatattaatcaggcattttttcggcttttatcattgtctaaactgattaatatagcggccaaccaacccctactttgaaaaggatttgcaccatgagcccactgatcaaaagcattctgtccacccgcgccggttacggcctgactatcctgcgcattgtggttggcatcatcttcgccgcccacggatcgcaaaaactctttggctggttcggcggctatggcctggcgggcactgcccagtggatggaaagcattggtctggcaccgggtacgttgatggcgctgctgtcgggcggtaccgagttctttgccggcctggcgctgatcattggcctgctggttcgcccggcagcattgggcctgaccatcctgtcgctggtggcgatcttctcggtgcacatccataacggcctgttcatggccaacaacggttatgagttcgcactggccttgctcggtggctccctggcggtactactggaaggtgctggcaaactgtccgcagaccgcgccatcgcccactgattgtgctgcaacaccttgaatcggcccgccctgtgcgggccttttcgttgctccggattcttgacaccgccccaccggcttctctaggatgccgttcatgcgccgatttaaacagctaattgcggggcgccatgggtgatcgttatcggtcccgacaggagcgtatttcatgcttcgaaattccgctaaagcgctggttcggtgttgcctctcacctgcccgcagacttttgaggcagagacacgacacgatgaatgcactacgccccctgatacgcctggccccgatcaccgcggaccttactcaacgcaacccgaaaattcttcttggcggcaagcaccagccgacgctattgcgttacctggacggttggccgcgtcgcactggccgaccgtcagcgttcctgatccagtttgttgaagatggcgattcacttgcgcgttttgccagcaacagctttgaccttgcggttatccaggcaccaagcgccaacaatgccaccgaggtcatccgccaattaacccgtattgcacgacaggggctgatagcccgtcgctgaaccttcagtgaatcgtgccgccggcttgcaaccggcgtcggcgctctccaagaaagaccatccaggcgatcaggcataacgtcagcggcatggcaaagatcgccaccagcgttatcgccaactccagatgacgcacttgggcgtaggcttcgcgctgcagggtatgcagctccatgggtaggcgcagacgttccttgttgagtgcttgcagctgggtattggtctccaccgcctgggtgccgagggtggttgtccatgggctcagccgttgccattcctgctctgttcgttgcaagcgtcgctccagttcgctggctttcgaacgataggcctgtcttgcgacctcacgcataccctccagcaccgtcggcggcctttcctgcgttgccctggggcgaatcgcgacgagcatgtcgggggcggacaggttatccagtgtattcagaacaaacagcgcgttgccatcgggcgctgcgtcgctgaccttatcggtaagcatgtccgtatcagcgatgaccacaacatgaatctgcgccgctgtctgcaacccggacggcaggcccttgataccatcgggaaaaactgaatagctcggcccttcgatgcgtgcagcaatgacatggcgctgctcccggctcgaagcctcttcaatcaaggaattgggtgtggttgcgcgagtggattggttggcatccaacagcaccgattgctcggaactttgcaggatcggggtgaaggttgtgcggcttttgttcaactgcgcgagcgtcccactgctcgatacggtcaccctgttgaggttccaggtgctgatgtcgttcaggttcatcgcctgtcgtggcaagttcagcctgactcgattgggcatatcaggcgtctcccagggcgtgtagagagcgtcgaccaccagcttgtccgtcggcatctggataccccaggcggcaagcacctcgtccagtcggctattggctgggagtgggtttgagcgttgttcgctcaaagggtcgatgaacatcatcaatctaccgcccctcaagacaaattgctcaatcccatacaaggtacgttccggcaacatccgtggctgtacaaccatcagggttttgatgtgttcggggatttgagcggcattcggctccagagcgaacagttcgaattctcgccgcaccgcctgcaagagccgacctgcggattcgtccatcgccagccccgacagcagcccaacaaccggtcgctccgggtgctgcaacttgtagagcaggtggcttatttcatattcgagcaacggctcgcgctcgaggctgaaagaaccgatacggcgcacgccatgaccggggctcgtgctgatgagcccgagaaaccctgtgttttcgtcgagccctgacagccttgctttataggcgtcttccgaatagggagcgggttcaatcacgtgcaggttgatcatgccctgagccttcttttcgtactccttgagcagatcctcaatacgtttgccatagcgtttcacggcgtagcttcgtttcgggtcgttatttgaattgaagtaatacacgtccaccgggctttccagcgttgcaagtagtgggtagacggggggcgataaagtgtggattttttgttgagaaagatcccaccgtatatcaggaagtttacctatccacaccaggttgaaagccaggaaaagcaaaaaggtgacgcatagcgtcataccggtgcgcagagtggaccgcattaagggtttcccttctcatctgtgtttgtagttgagcgtgactgtcgttgcggtgagaaaggtgaggatcatgctgataaaataaagtgtgtcgcgcagtgtgagttttccatcatcgatactgctgaatcgccaagtagggctgagggatgccaggctgtcgatcagccatataggggtttggtgttcaagtgagtccaatacataagaaaggccactggctgtcagtaacaagctcagcgtcaatacgaaaatgacagtgcgctgatgcaccagtgcgcaaataaaacagcctgcggataagtaactgcctgccagcagccaactcgccaaaaattgcgaggcaatgacaccgttgtcggccttgcccagatagttcgcaatgatcaccagagggaacattagaaacaggccggtgctggccaccagccaggcggcgaggaattttccgacaatccattcgaacgttgtgatgggcagggttttcatcaggctgaaaaaacctgcgttggtttcatcggaccagagttgagtggtcagggcggggatcagcaataagtacagcgaagggtggaaccggaaaaatacctgtaagtcactgccgttttgttcctgccacggacttacgtacaaccctaatgtcactgagagtatcaggaagatggcaatgttgaggtaagtgccgggggagcgcgcatagctggtgagttgacgcctcagaatgatgggcaatagtctcaatgggacgcctctttggtcagatggtggaccacatcattcaggcgacctggctccaggttcagtgagttgattttccagcgccggctggcaatcagcgtgttgatatggggatagatggtgtgtccgggcatggcgagaaccgtcactgtgccgggcgcgtttcgatgctcttcaatgcctgccacacctggcaggacagccagtgccaacaggtccagtggcgtctcggcagtaagggtgactgcctggaagtgacgcgagtcgcgctgtagatcgggcagtggcgtatcggccaccaggcgaccgttggcaatgaccagggcacgtgtgcacagttcggacaactcttcgcagtgacgcgaggcaatgatgaccgtcatttcttgcgttaacgattggataagcgccttgaatgcgtgcttctgatcctgcgcgagtccttcggtgggctcgtccagcagtaacagggcagggccatgcaggatggcctgggcaattgcgactttgcgtttccaggcgatggaaaggaggtcgaggggggcatcgagtaccgggaacaactccagtcgtgcgacggactgttccaggcggtcacgtttttcggtaccgcgaaagccacgaatggcagcaatgaaatcgaggaacgctttgacggacatcgtcggatgaccgaggtcgttggacagttgatagccgaccagttgccttgcttcgagcgggtgggtttgtgtgtcgaagccgtgaatttttatatgaccgctggacggctgtgtcgaaccggcaatgacatcgagcagtactgttttggccgtgtgatcttgtccgaacaacccgaggcatgcttgttgaccggcactgaatgaaaagtcgcggacaatcgtattgttacccatgtgttttgtcagattgcttacttcgatcattgttttaccgaataagtttggtatgacgtagggaagctgaaaaaagggtacgggttactctcgcttttgggaacgtcggtcagcattaataagagaagtcctacgtgcagggcgggcagaccactgaaacaatgtgtcgtgtcttggagtgtctaatttttgaatgtttatttgttttttatataaactttctttccaaataatgaggcctgattgcatgatgctgctacgtacccttgttcttgagcgaaatggtcaagatgctccggttaacggtgctctgctctgtgggtttgctgtcggtcagacggcctcaaactttcttgtttacagcctggatgaagagatagaacctggaagttccagggtctatattgcggccttgcgtaaaaaacttgaccggtattttctgggaggcgtcgaatccaaggaagacctgcaggtggcattgcatgttttcaagcaaatactgacattagccgcttcgggcgttaaacccggtggtgttaccgaaacccaggtgccttatcattttgtcgatttaaaaggttgcaagttgccacctgccaggcctgaggatcatcactcggtgatcatcaaaaaagcgctggtgatgaaagtgatcaccctgggcatgtctgcgccgacgttgccggctatcgaaagtgcttcagtgatcgtgccgtccattcgtttttcgtcacagatgatttcccctcccagggtggcgagcccctccgagtcgctccgcttaccgtcgcatgagcaaccgcttgaggagccccgacaggtgccctcgggcgcgccggtggacatagcacaggcctcacctgctatctcgcgcgaacccgatgcgccggtgccaacgaaacccgcgccttcagataatcacggtacattgttcgaagtagacagcacgctgaccaaccttgcccgtgtcgctcaagaattgacgcagcaaaaactcgctgcaatcgagcgggagactgcacttgagcagtggcaggcgcgactgcagcaggaacaaaaccaactggatgaaaaggttcgagagctggagcagcgcaccactcaactgcatgatcagtcgcttgcagtcagccagaggaccgaagccttgaaggtgatgacgtcacaagtctcgggcttgcggcagagtttgcgcggcctgttgctggagctggatcgcacgctggacaactagaccggcctggctactttcaccggttcatttatcatcaacgccagccagccgaacccagggcatgaaaccctggcgtatcggcacctatggacattgcctggggatgcaagcgtttgagtaccaagctgattaccaaagaaggccatgaagcgctgaaaaaggagctggattacctgtggcgcgaaaagcgcccggacaccacgcgcaaagtgacgtgggcggcttcgctgggggatcgcagcgaaaacgccgactaccagtacaacaagaaattgttgcgtgagatcgaccgtcgcgtgcgctacctgcgcaaacgcctggaagatatgcgcgtggtggagtacatgcccgagcaagagggcaaggtgtttttcggcgcctgggtggatatcgaaaatgagcagggtgaaaccaagcgttttcgtattgtcggctatgacgagatttatgaccggatggactacatatccatcgattcgcccatggcccgtgcgctgttgcgcaaggaggtggatgacgaggctatcgtgcagacgccaagcggtgacgtgtgctggtggatcaccgggatcgaatatgtgaagtgagcaaaatgggcccgtattctgtaaggaatgcgggcccatcgcgtttcaaccttcgcgcaacaccgtcagcgggctggcattcagcgcgcggcgggtgccgaacacaccggcaccgccgatcagcacggcaccgatcaccgggagcagcaacagccacgggtgagggtgccaggccaggtcaaatgcgtagcggtacagcacgaacgtcaccagctccgtgcccagcgcggccagcaacccactgacggcacccagcaaaccgaactcgatacgcctggccttgaccagcagcttgcgttcggcgcccagtgcgcgcaacagcgcgccctggcggatacgttcgtccagggtggcttgcaggccggagaacaacaccgtcatccccgccgccagcacaaacagcagtacatactccactgcgagggtcacttgggcgaggatgctgcgcaactgctccagcagcgcctcgacctgcaggatggtcaccgccgggaacgcgcgtgacaggtcgacgatctgctggtcatgcccgggtgccagatagaagctggtcaggtaggtggccggcaggtccttcaaggtatccggttggaaaatcatgaagaagttgggctggaagttatcccagttgatcgtgcgcaggctggtgacccgcgcttctcgattctctccgcccacggtgaataccaagtggtcgtcgagcttgagcttgaggctctccgctaccttggcttctaccgagacacccgggatttcatcggtaggttgcgacgaccaccacgagcccgccgtcagggcgttgcctggtggcaggtcggcggcccaggtcaggctcaggtcgcgttgcaccgcacggtcgccgctggagtccttgctgacgatttcctgtaccggttcgccattgatactgatcaggcgccccggcaccaccgggtacagtggtgcggattgcgcctgcagttccagcagacgggtgccaaaggcatccttgtcggccggcaggatgttcaaggcgaaatagttcggtgcatccttgggcagctggttttgccaggtgtcgagcagctcgccgcgcaacagtgcgatcaaacccatggacagcaggatcaagccaaacgccagggattggccggccgccgccagtgggtggcgcagcaactggcccaggcctaggcgccaaggcagggaggcacgggccagcaggcggcgcaggctttgcagcaacagcaggagcaaaccaccgagtaccagcgcagccaccacgccgccaccgagcagggcgaaggtcagcaccaggtcgaggctcaggcgccacatgatcaggcccaaggcgaacagtgccgcgccgtagaccatccaggtgctggaagggatcggcagcaggtcacggcgcaacacccgcagcggtggcactcgacccaatgcggccaacggcggcagggcgaaaccggcgagggcgaccaacccggtgccgatcccggcaaccgccggtagcagcccgccgggtggaacgtctgcgggcaacaggtcgtggagaaagtagaacaggccaaactgcgccagccagcccagcagggcgccgaccaggctggcgaaaagccccaggacgctcagttgcaggctgaacagcaacatagcttcacgtcgtgacaagcccaggcagcgcagcaatgcactggcgtcgaaacgtcgagtggcgaagcgattggccgacaacgccaccgccacacccgccagcaacacggcgaccaggctggccatgttcaggtagcgttctgccttacccagggcgccgccgatttgctggttgccgtcccgtgaatcctgcaggcgctggttggcggcgagccccggcttgatcaggtcacgataggtctgcaacacggtgctgccctgcggcccgcgccatagttcgcggtagctgacgcggctgccgggctgcaccacaccggtggcgtccaggtccgccaggttgatcatcaccctgggcgtgaggctgtagaagttgccggcgcggtccggctcataggtgagcacgcgggccaggcgcagggtcttcatgcccacatcgatgctgtcgccgaccttgaggtccagcgccgtcagcagccgcgcttccacccaggcttcaccgggtttcgggccaccccctggggtttcatcggcaaaaggcgcggctgcgcttttcagttcaccgcgcaatgggtactgctcgttgaccgccttgatgctggaaagctggatgccattatcggtggcgatgacgctggagaactccacgacgcgggcgtgatccaggccaagttcggtgccggaccggatctgctcggggcgggctggcgagctgccttcaagcaccaggtcggcgccgaggaattcggtggcgcgcaacaacatcgcaccgttgaggcgcgcgccgaagtaaccgatggcggtgctggcggcgactgccaccaacagggcgaagaacaacacgcgcaattcaccggcgcgggcatcgcgcattaattggcgcatggccaggctgaacaggcgcaacagcggcaaacgtgccatcaaggctccaggggcgcgaccatcaggccggcttcaaggcggatcaggcgtcggcaacgatgggccaggcgctcgtcgtgggtgaccagcaccagggtcgtgccgctctccttgttgagttcgaacagcaggtcgctgatgcgctcgccggtgtggctgtcgaggttgccggtgggttcatcggcaaacagcacgtccggttcggcggcaaaggcgcgggcaatcgctacccgttgctgttcgccaccggagagttggcgtggcgaatgggtcaggcgttggcccaggcctacgcgctccagcaggtgcctggcacgctcgcgggcgtctttgcggccgtccagctccagcggcagcatgacgttttccagggcgttgaggctgtcgagcaattggaaggattggaatacaaaacccacatgctcggcacggatgcgcgcgcgctggtcttcatcgagggtactgagggcttgcccggcgagggtgacttcgccgctgctgggcaggtcgaggccggccagcaggccgaggagggtggatttgccggaaccggagctgccgacgatagccaggctatcgcccttgttcagttccaggctcagttcgtgcaggatagtcagttcaccttccgcgctgggaaccactttgctaaggttccgcgcggtgagaatgcttgcgcccatggagaatccgatgcgaatgtggtttttgagtgctggcctggccttgatgtgcatggcccagaacgcagcggcgggtacagtcctgatcgttggcgatagtatcagtgccggtttcggcctggataccagcaaagggtgggtggccctgctgcagcaacggctcaagcaggaaggtttcgacgataaagtagtcaatgcctccatcagtggcgacaccagtgccggaggcctggcgcggctgccggcggcgcttgcagagcacaagccggatgtggtggtcattgagttggggggcaatgatggcctgcgcgggcaaccgcctgcgcaattgcaacaaaatcttgcatcgatgattgaccagtccaaggccggtggcgccaaggtgttgttgttggggatgcagttgccgcccaattatggcccgcgatacaccaccgcatttgccgaagtctatggcgagctggccaagcaaaaaaatgtcccgctggtgccgtttttcctcgatggcgtgggcggtcacccggagctgatgcaggctgatcaacttcacccggcggtcggcgcccagggcaagttgctggaaaatgtctggccgacgctaaaaccgctgctatgacgcttttctaccggcaggctttcggctaaggtggcgcccccccgatttggagcccctgatgtcgcgtcctgcctggtccctgtttaactaccaactgatcgagccggacgagcagctggatctgttcgcctgccaggaagtgcgggtgcatctggtggcgcgtcaactggaactgggcggctctatcgatcgcacgctgtgcggcaccctattgccggcgcaaccgcgttggtcgcgggtcgatcgttcgattttccaggaccagcgcctgtgcccgctgtgccgtgccatcctggagtcgcagaagcgcggcacgccgccgatctggccggagctgcgtttcgagttgtagggggcagctagaagcgcgcttcacgtatacaatcgatgtttacctacccgtcgtctgcgaaggatttaccggatgttgtcgcgcctttccgtcgtcacctgctgcctgtctctcgctgcgctttgtgcggccggttctgcgtcagctttgcagttgcctttgcccccaccgggtgaagacatcgtcggccaggtccaggtgatcaaggccaagtacgaagacacctttgccgacctgggcaccacctatgacctgggctactcggagatggtcgcggccaacccgggcgtggatgcctggttgccgggcgcgggcaccgagatcgtattgccgacgcgtttcatcctgccgccggggcctcgcgaaggcatcgtgatcaacctggcggaataccggctctattactaccccaagggtcagaacgtggtctacacgttcccgttggggattggtcgtgaaggctggggttcacccatcgcccataccagcatcattgccaagacgccaaaccctacctggaccccgcccgcctcgatcaaggccgagcacgccgccaatggtgacccgctgcccaacgtggtgccggccggcccggacaacccactgggtccgttcaagttcaccctgggcacgccgggttatctgatccacggttccaacatgaagtttggtatcggcacgcgtacaagccacggctgcttccgcatgttcaacaacaatgtgctggagatggccggcatggtgccggtggggacatcggtgcgtatcatcaacgatgcctacaagttcggcagcagcggcggcaaggtgtaccttgaagcgcatacgccgttgaatgatgacggtacgccgtcggtggtcgacaagcacaccgcggtgatcaacgccttgctcaagcgtgaagacctggcgaacaatttgcgggtcaactgggaccaggtgcgtgacgtggtcgcggcggaagatggtttgccgacggaaatcggtgtgcccggcgcagcgtcggttgccgccagcgcgccgatcgatctgcagcaataaggcgcgacatcaaacgcccgccaaggccttgcgccagggcgggctttttattgcgcgtgattcaggcacaaatcccaggcaataaaaaagccgacccataaatggatcggcttgataacaaccccgagggattattacttgcggctagctttttcaagcatgcgcagagcgcgctcgttagcttcgtcagcagtctgttgtgctttttgagcagcagccagagcttcatcagctttacggtaggcttcgtctgcacgggcctgggagcgagctgctgcgtcttcagttgcagtcagacgagcttcggtttctttggagacgctgctgcaaccggtagccagaactgcggccagagccagagcagagaatttcagaacgttgttcatcgtgttccccttcaaggactttctattagatggctagtatctcagagtgagccaatagccggcgtacatactacccattacttgtagtaagtaaactgacgtagcgcaagaagcaaaaaaaattctcgtgccgaatctattttggctaatcttttggagttttgtataaaaactgtccaatttttttaaccaggcgtaaatcggatccaggctgaaagggccggcccgcatgtgttaagccctgtaaacagatgaaattttatatatccacgccgacacttacgttcagcatggcttcgcgttgcccggtatcttttgcgcatgtagaggtgactttaagagcgcctgttcgtctcaaggttcaactgccggcaatgttcaggcgttcgatcatcggtagatcgaagccctttctatatccacccgtggcaggggatgacgagtgcgccttgagcaattgcaggattggtgcctactattccctacgtgcaggtgtgagcgctcagggttttctcgttgtcgaaaccggcacggggtggcgtagatgttccttcgccggaaaaacatcggtaaggtaggggtcagaatccaagacccgcgaggagtagtgatgagcgaggcgttgtccatccaccatgaccaggctggtcatcagttcgagaccaatgtggacggtcatcgtgcctatctgacctatatggatctcggcaaacagaccctggatatctatcggaccttcgtgcccaacgcactgcggggccgtggtattgcggcggcactgaccgaggaagccttgaagtttgccgaggaggcgggctacacggtgatcccgtcctgctcctatgtcgaacgctacatggagcgccaccagcgccatgccgcgaagttgtaaggcacaaatagcagcatgaaaaacgccgggctcagcccggcgtttttgtgtgcgctctataacagactcaggtgcgcttgcgcttaggcagcacgtccttgagcttggcgtgcatgctgcgcagtgtattttcggtggcggcccagtcgatgcaggcatcggtgatcgacacgccgtactgcaagtcggccaggtcttttggaatcgcctggcaaccccagttcaggtggctctcgaccatcagcccgatgatcgactggttgccttcgagaatctggttggcgacgttttccatcaccagtggctgcagggccgggtccttgttggaattggcgtggctgcaatcgaccatgatgttcggcttgatcttggccttgttcaatgcctgctcgcacagcgcaacgctgaccgaatcatagttgggcttgccgttgccgccgcgcagtaccacgtggccgtaggcattgcccttggtggtgacgatggacacgccaccttcctggttgatacccaggaaacggtgcgggctggaaaccgattgcagcgcgttgatcgccacagtcaggccgccgtcggtgccgttcttgaaacccacggccgaggacaggccggacgccatttcacggtgcgtttgggattcagtggtgcgtgcgccgatggccgaccagctgatcaggtcctgcaggtattgcggggagatcgggtccagggcttcggtggcggtgggcaggcccatctcggccaggtccagcagcaactggcgaccaatgtgcaggccgtcctggatcttgaacgagtcgtccaggtacgggtcgttgatcaagcctttccagccgaccgtggtgcgcggtttttcgaaatagacgcgcatcaccaggtacagggtgtcggacacttccgccgccagcaccttgaggcgctcggcgtactcgtgggcagccttgagatcgtggatcgagcaaggcccgatgacgacgaacaggcggtggtcggtgccatcgagaatgtcacggatgacttcgcggcccttggtgacggtctgcagggcagcgtcgctcaaagggatttcgcgcttgagctgatcgggcgtgatcagggtctcgttggattcaacgtttaggtcattgatcggtaaatcagccatcgtgttactcgtcagggtcacgggtgccggccgccagccatccccgtgcggcggagcacagcatgatttgaatgcaggggggaggaaccttagcgcgtaacaccggcccgcgacaatgggcaaagcccgctttaatccagtgctggcgccacaaaggcttcgtgggagaactcgctggcatggcgcgatacccactcacgggccagggcttcgagttgctggggtgtcggttcggtgtcttcgtgctggcggcagtagcgctctatccggcatgcttgctcacccatgcgtgcaccgaacaacgcatgttcatcggtaaacgagacaccgacgcggtagccgttttccaccttgcggcaccacgccacatagcctggataacgtgcgctggcacccagggacgggatatgcagatcaaccgccgtgccttcgcgccaggcgcgtggccaatggcaggcgatgccgcccaggccgatagcgtgcaggcgttggcgagggatggcgggagagggacgttggattaactcgacagcgacatcatcagggtgaggtaaaaaacgacccatgtacacggactccgagcaccgtccaattgacggcggtggcagcagtatagtgaaggaactggaattgaccgacctggatattgaccagcaattgctgggattgccaggtatttctctggtgatctttaccagcgcagggtgttccagttgccgctgggcacgccagcaagtgccgggctggccgttaccggtggaccggctgtgctgggtggacgccgggcacaacggtggtgcggtcgaacgctaccagatctttcatttgccggcgctgttcgtggtgtgcgagggtcaattccttgggcaaatacagacacgtcttacgcgtgacgacgttttcgatgccgtaaaacaggcactcacccgtccaactgaggatttgccatgacagcagttacaccccagccaccacgcattggcatcatcggcaccggtgccattggtggtttctacggcctgatgctcgcccgcgccggtttcgatgtgcactttttgttgcgcagcgaatacgcggcggtcagcgagcacggcctgcacttgaacagcaccgtgcacggcgtatcgcatctgcatcccgtgcaggcctacgcccgcgctgctgatatgccgccatgcgactggctgctggtgggcaccaagtcgaccggcaacgtcgaattggccccgaccctcgcccaggtggcggcgccggatgccaaggtggtgttgctgcaaaacggccttgatgtggaagacagtctgcgtgaacacttgccggcgtcgctgcacttgcttggtggcctgtgttatatcggcgtgcaccgttctggtccgggcgttatcgagcaccaggcgttgggccgggtcaatctggggtatcacagtggcaccgcggccaatgatgacgcccgccaaaaggagattgtcgacgcaggcgccgcgttgtttcaccaggccggtatcgagtcgcaggccatggccaatgtgcatctggcacgctggcacaagctggtgtggaacgtgccttacaatggcctgtcggtgttattgggcgcggggacctcggcgatgatggcggacgaatccagccgcgaactgatccaggcgctgatggccgaagtggtgcagggtgcccacgcctgtggtcatgagattccccaaagctacgccgagcagatgtttaccctgactgaaaccatggacgattacctgccgagcatgtaccacgaccacgtgcacaaacgcgcgctggaactggcggcgatctacgcccgcccacttgctgcggccagggctgccggctgtgagctgccacggatgcaggcgctgtatcaggccttgagttttattgatcggcgtaaccgctgagcagggggacacaccatggcaaagggattgggcgacaaactggtgctggcgatttcgtcgcgggcactgttcgacctcagcgacagccacaagatctacctcgcccaaggcgtcgaggcgtaccgcaagtaccagatcgagcacgaggaggaaatcctcgaacccggcgatgcatttccgctggtcaagaaactgctgagcctgaacgccagcctgggccgtgcgcgggttgaagtggtgctggtgtcgcgtaacagcgctgacaccggcttgcgcgtgttcaattcgatccagcattacggcctggatatttcccgtgccgctttcgtaggcggtcgtagcccttatccttatttggcggcgtttggctgccacctgtttctttcgacccatgccgaggatgtacgcagtgccctcgatgcggggttcgcggcggcgacgattctgtcgggcggcccgaaccgcgcatccagcgaagaactgcgcattgccttcgacggcgacgctgtactgttttccgatgagtcagaacgtgtgtaccaggccggtggcctggccgcgttccaggccaatgagcgagaggcggcgcgccaaccgttgcacggcggtcctttcaagggttttctggcggcactcaacttgttgcagcgcgagtttcccgatgaggcctgtccgatccgcaccgccttggtcactgcccgttcggcgccgtcacacgagcgggtgattcgcaccttacgtgaatgggatatccgcctggacgagtcgttgttccttggcggcctggagaaatctgcattcctggaggcgtttgccgccgatgtgtttttcgatgaccaggccgggcattgcgagaaagccatggaatttgtcgccaccgggcacgtgccccatggcatcagtaatgaggtgaagatctagggcgctgctaagctgatttcatctccgccatcctggcagtccaggaggttctatgatccgttcgatgctgtacgccacggacctcggtctgtacgcgccttatgtgatgcaacatgcgctggcgctggctcgaacgttcaaggctgacctgtatgtgattcatgtggtcgagcccatcggcctgttcgccgaatcggtgttgcagagctaccttgatgagaaggccttgagtgagtggcaaagccaggggctggctacggtcatggcgacgatcgaacagcgggtgctggacagttttcgcgaagagttgggggacgaggggcaggacctgaagttgattcgctcggtacgggtgatccagggggacccctgcgaggtgatactcgaccaactgcgcaaactttccgtggatctgctgatcgtaggaagtcacagccatgcaaccgcggcggctaccccgttgggtcgtaccgctgcacgggtgctgcagctgtctacggtgccggtctacctggtgccttcgttgcaacgtcgacgcagtgatgacgtgtgatggatgaaaatcgataaaaagttctagatttatccataaaacctttaatatagttatataccgtcgctgatacccgtggcgtctatctgctttgagggacacatatgaagcttcaacaactgcgctacatctgggaagtggcgcaccacgacctcaacgtttccgctaccgctcaaagcctctacacctcgcaacccggtatcagcaagcagatccgcctgctcgaagacgagttgggcgtcgaagtgttcgcgcgcagcggcaagcacctcacccgtgtcaccccggccggtgagcgcatcatcaccaccgccggcgagatcctgcgcaaagtcgaaagcatcaagcagatcgcccaggaattctccaacgagaagaaaggcaccctgtccatcgccaccacccacacccaggcacgttacgcattgccgccggtgatccgcgatttcatcaagcagtacccggatgtggccctgcacatgcaccagggttcgccgatgcagatcgccgaaatggccgctgacggcaccgtcgatttcgccattgccaccgaggctcttgagctgttcggcgacctggtgatgatgccgtgctaccgctggaaccgttgtgtggttgtaccgcaaggtcaccccttggccaagctgccgaagctgaccctggaagccctggccgaatacccgatcgtgacctacgtgttcggtttcaccggccgttccaagctcgacgaagccttcagtcatcgtggcctcacgccgaaagtggtgttcactgccgccgacgccgacgtgatcaagacttatgtacgcctgggcctgggcgtgggcatcgtcgccaagatggcggtcgacacggccctcgacaaagacctggtggtgctcgatgccagcgagctgttcgagtccagcgtgaccaagatcggcttccgtcgtggcaccttcctgcgtggcttcatgtgcgatttcatcgagaagtttgcgccgcacctgacccgtgaagtcatggccaaggcgatccagtgccacaacaagcaggagctggaagaactgttcgacggcgttgaattgcccgtccattaagccagcggtttatttggcctcggtaaccgtaaaatgttgccgggcgcctgccaccagaatctccacctcatcgccttcgaacttgcccagcaggcttttgcccagtggtgagcgcggggtgatgacggtcaacggttgtccaaccacgtcaaccttcaaaccggccgcatccggcgccaggaacagccattgctggcgactgctctcatcttccaggcccagcagggtgccgacttctataccgcgctgatcatcgtaggcccgtaatggctggttctggcacagcgccaacgcctgcttgatctcctcgacgcgcttggcttgcccggccgccaggtaggatgcctccagcccgagggtgtcgtacttgttttcagcgatgttttcttcgtgggtcgcggtttcgtaggcggtctgcgcggcgcgctgggcgatgtcgaggtcgacgctgagcttttccaggatgagcaggtggacggcgtgtttattcatggtcatcaatcgcagaattgcaggacattggcccgggtcttttcgttgggagcgttctggtcctgttgcagccagaactggcatttggggttggacaggttgcgcgcattgttgcgcgcctggtccaggctctgttgctgctcctgtttctgcaggttctgctgatactgctcgaacatgcgattcggcagttcaggcgcggccaccgcaggcttgcccaattgctgcactgcctgggccaccggcgccaggctctgggggaacaggtagcgcgacgccagccaggtggtcagcacgatggcgataaaccccagccatacgccaaacgagatagcggcactgagcttgaacagcgacaacggacgatcagacatgaggccctcctggcaggcattgacggcgtggcggcgattgtcgcacagccaccgtgcagaataatcgtgatcaagccttctgcatccgcacatttatgcggacaatcgaacctttgagcgttggagcccggaatgaaagcccgctgggatattttttgcagcgtcgtcgacaacttcggcgacatcggcgtgacctggcgcctagcccggcaactggtggcggaacacgcctgtgatgtgcgcttatgggttgacgacctgcgcgcattcgaacgcatgtgccctgagattgatgtgcagctcgatcaacaatggcaggaaggcgtcgaagtgcgtcattggccggccgagtgggtgggcgcgcccgcggcggatgtggtgatcgccgcgtttgcctgccagttgccgcctgagtatatggaggccatggccgagcgtgaacgcacgccggtgtggatgaacctggattacctgagtgccgaggaatgggtcgtgggttgccaccggctgccgtcggtgaagttcaagggcgtgcagaagtacttcttcttccccggattccgccccggcaccggcggccttttgcgtgaggccgggttgctggaacagcgtcgggcttttcagcaggatgcgagtgcgcagcaagacttcctgcaaaccttgggtgtgtttcccacagccggtgcgcggctgatctcactgtttgcctacgaaaacgccgggctcgccagttggttggacgagttatcgacggacgggcgtgccactcatctattggtgccggaggggcgcattctgggcgatgtgcagcgctggctgggtctggatcggctggtggcgggggatatccaccagcgcggctcgctgaccgtgcaggtcatcgctttcgtgcgccaggaacaatacgaccgcctgctgtggtgctgtgacttcaatgccgtgcgcggcgaagactcgttcgtgcgcgcccagtgggccggtcgcccgctgctgtggcatatctatcgacaggacgaagatattcacctcgacaaactcgatgcctttctggatctgtacaccgccggtttgtcacccgctgcaaggcaggcgttgatcgggctctggcaagcctggaacacggagggcgatatggcccaaccgtggaaaatgctgctggaacattggccggaggtcagccagcatgccgaaacatggtgtctggaacagggcttgcaggccgatcttgcgacggcgctggtgaagttttatgaaagttggatatgatacgccaccttgaattttgtaaatcccatccaaatttcggatatatgcaatgaaaactggtaaagaactgaaacccggtacagtgatccgtctcgaaaacgacccttggctggttcagaaagctgagttcaccaagtctggtcgtaacagcgccatcatgaagaccaagctgaagaacctgctgaccggttacaagaccgagatcgtctacagcgccgatgacaaactggacgacgtgatcctcgaccgcaaagaagcgaccctgtccttcatcagcggcgacacctacacgttcatggacaccaccgactacaccatgtacgagctgaacgctgaagatatcgaagctgttctgccgttcatcgaagaaggcatggaagacgtctgcgaagctattttcttcgaagagcgcctggtttccgtagagctgccgaccaccatcgtgcgtaaggtggcctacaccgaaggttccgctcgcggcgacacttcgggcaaggtgatgaagcctgccaagctgagcaacggtaccgaactgcaagtggccgatttcatcgaaatcgacgacctgatcgagatcgatacccgcgaaggcggttcgtacaaaggtcgcgccaagaagtaattctggccccgccgctacgaaaaaaagcccgaccttgtgtcgggctttttcgtgggtgctgcctttacttcaggtgttgcttcagttcatccgaggcctgtagcagtgcggagcgtacggccggcacctggctgaccacattgagcaaaccgtagtcgtggatcatgccgttgtagcgcaccgccgtcaccggtacacccgcctggtccagtttgcgagcgtaggcttcgccttcgtcacgcaacacatcggcgccggctgtctggatcagcgcaggcggcaagcctttgagctggtcggtggtggcccgcagcggcgaggcgtagatctcggcgcgctgggtggcgtcggtggtgtagttgtcccagaaccacttcatcatgttgcgggtcaggaagtgcccttcggcgtactggttgtaggacgctgtgtcgaaattggcgtcggtcaccggccatagcaacaattggaacttgatcgccggcgtgcccttgtccttggccatcaggctgaccactgccgccatgttgccgccgacgctgttgcccgcgaccgccaggcgcttgccatcgacattgatctctttaccgtgctcggctacccattttgtggcgccgtaggcctggttgatcgccaccgggtaatgggcttccggcgaaggcgtgtagttgacgaacaccgccactgctcccgaacccaccaccagatcccgcaccaggcgctcatgggtcgggtaatcccccagcacccagccgccaccgtggaagaacatgaacacaggcaatgtgcccttgaccccggctggccgcacgatggtcaggtccagcggcttgccgtcgacctggatggtcttctggctcacatccgccttgggcaaggtcagcttcacaccggcctgggcgccggtcagtacggcacgggcgtccttgggcgtcagttgttccatcggtttgccggtgcctgcgttcaacacatccaggaaggactgggtgttgtgctcgacatcacctgtcgccgcaaaggcgtgggtgatggacaaggcgagcagggtgccggtgagcgctttaccaattgtgttcattgctttctccaggggcggccgagggcatttagacggtcacgtgcaggcgaacatcgacgttgccacgtgtggcgttggagtacgggcagacttggtgagcggcgtcgaccaggctttgcgcgtcgtcctgggccaggcctggcaggctgatgtgcaggtcgatgtccaggccgaaaccgccggggatctggccgatgccaacgtgggcagtgatcgacgcgtcatccgggattttgcgtttggtctggctggcgacgaatttcagggcgccgatgaagcaggccgagtagccggcagcgaacagttgttcggggttggtggcctggccaccggcaccgcccagttctttgggggtggagagtttgacgtcgaggatgttgtcgctggaaacagcacgaccatcacggccgcctgtggcggtggctactgcggtgtagagcgtttgcatggtgttttcctctttgttgttagcgctaaatgtttgcgcgctaagtagttggtgaggcgaatgtatagcgctaatgtttagcgcgcaagataaattttcaaattttttcaaattcaacctgcaggggccggcttggcggctcctgcaaggggagaggtttaaacgctggcttgcaggttggcgcgcaacgcgatcaggtcgctttgcaacttgcgcaattgctccagctccaggccgctggcacccaggatgcactggggaatgcccatggccttgtcttgcaacgcccggcctgcgtcggtcagctccaccaccaccacgcgttcatcttcacggctgcgggtacggctgagtacaccttcggcttccaggcgcttgagcaatggggtgagcgaacccgggtcggtcagcaggcggctgctgatttcgccgacagtcaaaccatcctcttcccacaacaccatcatggccaggtactgcggataggtcaggccaagcgcttgcaacaacggcttgtagaccttggtcatcagcagcgaggtggagtgcagggcgaagcacagctggttatccagcatcagcgattcgcacggatcagggttcttactcatggctgtacctcgaaaaagcatgtctgggctggaatctagcgggcaaatctttaatgcgccagataattctgtccgagcggtcagaccaagccactctgtagcgccaggtcccaaggtggcaccggactgaagcgcgatttcagatattccagcagcagtcggctgcgggcattgggctgctgttccaggcgcagcgcatagatgccggtggtctcgggactgggcaggccgccttcgcagaacaaaggtagcagttcgccgcgcaccaggtattcgctggccagccacgtggggaggtgggcaatgcccagcccggccaaggcgccagacaacaaggcttcagcgttattggcgctcatgcggatgcgctgcggtcgataggtggcacggcgcccatccagctcgaagcgccaggcgaacgtcggcgccaggccatcccagtccaacccgtcatgttcgctcagttcccgagggtggatcggcgtgccccggcttttcagataggccgggctggcgcacgcgatgcgcacgatgctggccaagggcgtggcgatcaaccgcgtgtcgacgagatggccggcgcgcagcactaggtccaccttgcccaggtgcgcgccctgcatatccacaaagctgtcgatcagatgcaggtgcacatccagtcccgggtagacattgaggaaatccgcgatcaccggcgccagatgccgtcgaccaaatgccgctggtgcatcgactcggatgaggccttccggcgcatggctgagggacaccgcttcggcccgcgccagttgcagctcgctgacaatccgccgtgcccgctcggcgaaggccaggcccgccggagtcggcactacggcgtgggtgctgcgctggaacaagcggctgccaaccgagctttccaggctgtcgatccgccgggctactgccgagggcgtcagcggatgacggcgtgcggccgcggagaaactgccggtttccagcacatcgagaaacaggctcagttgatcggtcagaggattggggttcatcgtaacgtcgcttatgcgagattggcacagccattgtgcgttgctgtgcgtttccgcgccagagccgactgcgtagcatgcaaggcctgggattgcggagtaacaagcggtgttggatttagtgatgtacctgatcttgggcgcggccctcggcacggtgggcggcctgtttggcattggcggtgggttgattgcgatcccggtgctgggcgtgttgttcggcctggaccagcaattggcccaaggcaccgccttggtaatggtggtgcccaacgtgatgctggcgctgtggcgctatcaccagcgcaaccgtatcgagctgcgccatgcgttgccgctgggcgtcatgggtttcacgtttgcctggctgggttcgatctgggcggtggggctggatgcgggtgcgatgcgcatcggttttatcgccttcctgttgacgctatccgcctataacctgctgcgcatgttcacccgtaacgcgccgccgacggcgcagatgcgttattcctggccatggcttggggtactgggtgccgcctccgggtccatgggcggtttgtttggcgtaggcggggcagtggtcgcaacgccggtgttgaccagtttgttcggcacaacccaggtggttgcccaaggtttgtccctggccttggcattgccgagcaccggcgtgacattggtcacctacgcctggcaccaggaagtggactggatgatcggcgtgccgtttgccgttggcggcctgctcagcatcagttggggcgtgaaggtcgcccatgcattgccggagcgcgtgctgcgcggtctgttctgcggcttcctggtggtgtgcgcggtgatgctgacttttaaagtttgaatccttcgaggatgtactccgccaggcagtcggtgatgggggaggtcatcgccgggttgcgtagcaatcgaagcgtcatcgatggcagcggcggaaaaccttcttcgctgccgagcacccgcagatcgtcggtcaccaggctttccatgctgaccattaccgccaggccggaactcaccacggcctgaatcgccgccacgttggaactgtggtaggccagtcggtagtcccgccccgcggcgtccagtgccgcacgggtccactgggtgcagaagctgtcgaccccggaaattgccagcggcagcgcgtcgtgttcgtccacgcagaagcacggcgcggccacccacaccatgcgctcggtgcgcagcaactcgccaatttcattgccgggttcgcggctgataacggtcagcgccaggtcccggcgctgcatcaacaccgtcgacgcctcgcagtgcatctcgatctggatcagcggatatgccttggaaaaccgcttgaggatgcctggcaggaaacgcatcacgtagtcgtccggcgtgccgatgcgcaccaacccgaccatgtgcggctcgcgcagggtgttgaacacttcgctgtgcagtttcaggatgcgccgcgcatagcccagcaagacctggccctcgggcgtcagccgcacctgccgaccatcgcgttcgaacaacttgcgctgcaatacgtcttcttccaggcgtttcatctgcatgctcaccgccgattgtgtgcggttgacccgttcgccagcgcgggtaaagccgccctcgtcagcgatggcgacgaaggtgcgcagcacttcagtgtcgatgctcgggtagccggacaattgatcaatctccgagatgcattgcataaaaaacattcgttggattgatcataaggccaggcacacacttgcgccatccccactggagggcgagaagatgaaaggtcaaagaggttttgtattgctggcgaaacgtccgtttgccgggctgtttcacaaggttgcgcgctggcaggcgctgcatgaggagcgccagatgctggcgaccttgagtgatgatgcgctcaaggacatcggcctcaatcgcggcgacgtggagcaggagcgccacctgcatttctggcaagacccgctgcgaaaataatcgcggatgcagtagggtagtcggcgagtccccacggagaaacccatgcccgccgacctgtctttttcactcaagcaagctcgacgcatggcgctggcggcccagggtttttccggacgccaggcgcctgcactgatcaaggctgcgcacctcaaccgcatgatcgagcgcctgggcgtgttgcagatcgattcggtcaatgccgtggtgcgctcccattacctgccgctgttttcccgcttgggcaactactccccgctgatacttgaacaggccgcctggagccaggggcggcggcgttcgctgttcgaatattgggggcatgaggcatcgctgttgccgatggcgctgtacccgctgatgcgctggcgcatggagcgggccaggcaagggcagggcatttattcgcaaatggcacgttttgggcgtgagcaacaggccactattcagcgggtgctgcagaccgtcgagcaacagggcgcgctgggtgccggcagcttgtcgacccgcgaggagcgcgccggcccgtggtgggactggagcgacgaaaagcacgcgttggaatggctgtttgccgctggcctggtcacggtcgccggccggcgcgggttcgagcggctctatgatttgccggagcgggtcattcccggcgatatccttcaaacctctgtgactgaaaccgaggcccagcgcggcttattgctgcacagcgccaccgcgttgggggtcggtactgaaaaagacctgcgtgattacttccgtctcgacccggccgacagtcgcactcgccttgctgaattggtggaagacggtcgattgttgacgtgccaggtacaaagctggaaacaaccggcgtactgcctgcccgatgccaaagtgccgcgcaaagtgccggccagcgccttgttgtcgccatttgattcgctggtctgggagcgcagtcgcaccgagcggctgttcgacttccgttaccggctggagatctataccccgcaagacaagcgggtgtacggctactacgtgctgccgttcctgcacaacgagcggatcgccgcgcgcgtcgacctgcgtgccgaacgcgccaatgggcgcctggcggtgcatgcggtgcacgaagaagagccggggttggatgaggaagggatgttggcgctggcgcagaacctgcggcaaatggccgactggctggggctggagcaggtgcagctcaactgccaaaggcccagtgccgaccggttgcgggcggcgatgatcagcatgggggttggtctttagggcctcatcgggggcaagtcgaatcgtcgcaccgcccctcccacacttgaatgtattcacagatcaaaatgtgggagggggcttgcccccgatgaggccctgaaggcaactgaaaactcagcgtttgacttgcttcaatgtctcggcaatcagaaacgccaactccagcgactgatcggcattcatgcgtgggtcgcagtgggtgtgataacggtccgacaatccatcctcggtgatcggccgcgcgccaccgatgcattcggtgacgttctgcccggtcatctcgatatggatcccgcccgcataggtgccttcggcctggtgcacctggaagaattccttcacctcgcccaggatctgcgcaaagtcgcgggtcttgtagccgctgctggccttgatggtgttgccatgcattgggtccgagctccacagcacttgcttgccctcgcgctgcacggcgcgaatcaggtggggcaggtgatcgccgaccttgccggcgcccatgcgcgcgatcaggttgaggcggccggggtcgttgtccgggttgaggatatcgatcaggcggatcaggtcatccgggttcatgctcggcccgaccttgaccccgatcgggttgttcaccccgcgcaggaactcgacgtgggcaccgtccaactggcgagtgcggtcgccgatccacagcatatgcgccgagcagtcgtagtagtcgttggtcaggctgtcgcggcgcacgaaggcttgttcatagttgagcagcagcgcttcatgggcggtgaagaagctggtctcgcgtagttgcggcgagctgtccatgccgcaggcgcgcatgaaggccagggtttcgtcgatgcggtcggccaactggctgtacttctcggccagcgcggagttggcgatgaaatccaggttccacttgtgcacctggtgcaggtcggcaaaaccgccctgggcaaaggcgcgcagcaggttaagggtggcagtggactggtggtaggactgcagcaggcggtccgggtccggcacgcggcttttttcgtcgaaaccgatgccattgacgatgtcgccacggtaggcgggcagtgtgacaccgtcgatggtttcatcattggccgaacgcggcttggcgaactggcccgccatgcgcccgaccttgaccaccgggcagccggcggcgaaggtcatcacgatagccatttgcagcagcactttgaacgtgtcgcggatttttgcggcggagaactcggcaaagctctcggcgcaatcgccgccttgcagcaggaatgcgcggccctgggtcacctcggcaaactggcggcgcaactcgcgggcctccccggcgaacaccagtggcgggtagctggccaggttctgctccacttgcagcaagtgtgcagcgtccgggtaccggggttgttgctggatcggcagggcgcgccagctgtcggggctccagggttggctcatcatgaactcgattggctgattgacggtggggcgccaatgttatcagcaattagtgcgtgacctgttgccgtcggttggccgacaatcgcgcctttgccgtgcagcaaacccgttaggagtagtgatgaccgaggagcgtgtcgagcgcctgctggccgaagtccatgatgatttcggcatgatccgtgtgctcgaagtggccgattaccgttttctcgagtttggcgacgccatcgagcaaagctgcgtgttcaccgctgatccgagctggctggagtacgactacacccgtgcgatgctgatcggtgcgttgtgtcatgaacaacccgagagcgcgctgttcctcggcctgggcgccggcacgctgacccaggcgtgcctcaagttcctgccgctggaagatgtggaagccatcgaactgcgccccgatgtgccacgtctggccattgagttccttgggctggatgacgacccgcggctgtacatccgcattggcgacgcattgcaattgctggagaccgccgagtcggccgacctgattttcgtcgacctctataccgatgtcggtcccggcgtcgggcatctggcgtggaccttcctggagaactgccagaaaaaactcaaccctggcggttggctggtgatcaaccaatgggccaccgatgatggcaagccgctgggcgcggcattgttgcgcgggttgtatcaccgtcattactgggagctgccggtgaaggagggcaatgtgattttgctggtgccttcggagctggatcaggcgctggatctggaggcactgtccgctcgcgccgaggccctggcatcgaagttggggtattcgttgcagccgttgatcaaggcgattcgcccggcgacctgagctagatgcctttgaatatgccgggtcgcttctcaatcattgcccgcacaccttccttggcatcctcactgttgagcaatttgtccaccatcggcggcaacgcctcagccgccacggcttcgccttccatgcgcgccagccgtgccgacatcaacgtagcctgcacgcccagcggtgcctggcgggcgatgcggttggcgagttcgacggcgcggggcagcaagtcctcgctggccatcacttcctgcaccaggcccaggcgcagggcttcatgggcatcgaattcgtcgccggtgagcagccagcgcatcgcgttgccccagccggcgatctgatgaaggcgcagcgtcgcgccgccgaacggaaagatgccacgctgcacttccatctgcgcaaagcgcgtgttgctcgcacagaggttgatatctgcggccagcatcaactctatcccgatggtcaggcagtagccctgggccgcgacgatcaccggtttgctcacgcgcgggccggcaaacacgccccacggatcacaaccgcccagaggcggctgccagccactggccatcacgctgctgacattggccaggtccagcccggcggtaaagtggtcgccatgggcaaataccacggccacccgagcgtcgtcatttcgatcaaattcgccatacgccaggctcagctcattgagcaggtcgaggtcgaacgcgttgcgtttggccacccggtccagacccaaaagcaagacatgaccctggagttcacggctgacgcggctgctgctggcttgattcatcgggtgtgccctcgggcgcggggaaaggtttcggaccaaaggaccgcaaaggtcaggtgaaccgtttaagcgttatgaccagcagggccgggcctctgaaaaatagaccctggcggtgttatctgcaaagactgtgatgcagcgcggtttatcggtgccttacgataaaaaaagctccctttttcagctatttccggtatagtgcgcgccggcctttaaccgggccgcgtttaggtagcgcaattccccgaagtcagcttcggctgcacgtccgcacagcggactctcccttgacgaatctttttcattcattcgttttcgcaaatccccgccgacaaagcagccagggcgactcttgagtctcaacacggcatgcgcagctttggagcatgggtctttgcggatgcacttagaggcagacccatgacccaggaaaccggcggcttcgccgcttttaatcttaacccgaatattcttgcagcagtcgcagcgaccggctacgaagaaccttcggcgattcagcagcaatcgatcccgatcatcatggccggccaggacatgattggccaggcgcaaaccggtaccggtaaaaccgccgcgttcgccctgcctatcctgcattgcatcgatcctgccaagcgcgaaccgcaagccctgatcctggcgccaactcgtgagttggcgctgcaagtagcaaccgcttttgaaacctacgccaagcaaatgccaggcgtaaccgttgtggccgtttacggcggcgcgcctatgggcccgcaactcaaggcaatccgcaatggcgcacagatcgttgtcgccaccccgggccgtctgtgcgaccacctgcgtcgtgacgagaaagtcctgtcgaccgtgaaccacctggttctggacgaagctgacgaaatgttgaagctgggcttcatggatgacctggaagtcatcttcaaggcactgccaccgacccgtcagactgtattgttctcggccaccctgccgcagtcgatccgtgccattgccgaacgccacctgcgcgatccgcaacacgtgaaaatccagaccaagacccagaccgttaccgcgatcgaacaggctcacctgttggttcacgctgaccagaagacctcggctgtattgagcctgctggaagtcgaagacttcgacgccctgatcatgttcgtgcgcaccaagcaagcgaccctggacctggccagtgccctggaagccaagggctacaaagccgctgcgctgaacggtgacatcgcccagaaccagcgtgagcgcgtgatcgactccctcaaggatggccgcctggacatcgttgtagcgaccgacgttgctgcccgtggcctcgacgttccacgtatcacccacgtgttcaacgttgacatgccatacgacccagagtcctacgtgcaccgtatcggccgtaccggccgtgccggtcgcgaaggtcgtgcactgctgctggtgactccgcgtgagcgccgcatgctgcaagtgatcgagcgtgtgaccggtcagaaagtcgctgaagtgcgcctgccggatgcccaggcagttctcgatgcccgcatcaagaaactgaccaacagcctggcgccactggtggccgacgctgaatcgacccacggcgacctgctggaccgcctgaccgccgacatcggttgcaccccgcgtgccctggctgcagccctgctgcgcaaggcaaccaacggtcaggccctgaccctggcggccatcgagaaagaacgtccactggtgccgaacagcgcgccacgcggtgatcgtccagagcgttccggcgaccgtccagaccgtggtgatcgtgagcgtcgtgctccggttccattggctgaaggccgtgcgcgttgccgtaccgcgctgggcgcgcgtgatggcattgctgccaagaacctgctgggcgctatcctcaatgagggtggcctggcacgtgaagccatcggtcgcatccaggtccgtgacagcttctccctggtggagctgcctgaagacggtctggaaaaactgctgaccaagctgaaagacactcgcgttgccggtaagcagctcaaactgcgtcgctaccgcgaagattgatccgcccttgggctgattgatcgcaagtaaaaaatccccgactggttcggggattttttttgcctgaaacttaccttagccgaagcggtagatgtccatgcccagcgcgcccatggtgaatccctggtgtgccacgctgaattcgccaccggcacctcgtgcaaagtacagcggcagcaagtgttcatcgctgggatggctgcgcacggcattcggtgccaggcggcgatagtcgtgcagcgcggtttcatcgttggctgccagcttatccaccacccaatcgcggaaatcccgcgcccatggctcgatgctctccggtcccgcgtgccagtccaactcgcccaggttgtgggtgatgctgccagagccaatcaacaacacaccttgctcacgcaggcccgcaagagcatgcccgacgcgggtctgcagggcaggccccatacgactgggcaacgacacctgcaccaccgggatatctgccgccgggtacatcagcgacagcggcacccaggtgccgtggtcgaaggggcgacggtcatcgatgcgcgcaggcaggccatcggcgtgcagcagctcgacaatcttgccggccagctgcgggtcacccggtgccgggtactgcacggcaaacagcttgcgggggaagccgccgaagtcgtgccaggtttcgggcgcggcgctgccgctgaccaggagttcagagctttcccagtgcgccgacaccaccacgattgcctggggccgtggcatctcggccgctagccgttgcagcgccgggccactggcgccgggttgcagggcgagcatgggcgatccgtgggagataaacaggctggggagcataagtagggtcctgagcgttaacatgggcccatcttcaatcagatcattgatctaaatctaatataagttttagtgccatttgatcgaatttcatggaggatctatggagcctaagttttggcaggagcgctgggcgaataatcagatcggctttcacttgcccgaggtcaacccctacctgcaacggcactggccgcggttggccgatggcgccaaagtattggtgccgctgtgtggcaagagcctggacctgatatggctggccgcccaaggtttgcatgtgctcggtgtagagctttctgagcaggcggtcgaggcgttcttcaacgaacaaaatctcgtcccgcgaatcaccgaacgtggcgcgttcaaggtgtaccaggcagatttgatcgaagtgtggtgcggcgacttttttgccctggagcctgaagtgttagctggttgcgctgcgctttatgatcgcgccgcactgatcgctttgccgccgctgatgcgtgcgcaatataccgagcatttgaatgcttgcctgcgtcctggctgtcagggcctgctgatcacccttgactatgaccagacgcaaaaagccggcccgccctttgcggtggctgacgatgaggtggcggtgctgctcgggccgcactgggcgttgaaggtgcttgaggagcaagacatcctgggggagagctggaagtttgtgcaggacggcgtcacacggctggatgaacgggtgtatcagttaaccaggcgctgaatttaccgatcgctatcgggggcaagccccctcccacttttgatgtgtgaacgcatgcaaaatgtgagagggggcttgcccccgatgaggccttcagacctgcaaaaaaggggcgatcagatcgccccttttttgtgttgctgtcgcctgtcagccccgacgacgcaacgcgtcgatccgttcttccagcggcgggtggctcatgaacaggcgagccatgccctgcttgataccgccgttgatgccgaaggcggtcaggctgtccggcatatgcaccggcaggccttgttcggagcgcaggtgttgcagcgctgcgatcattgccccggtaccggccaggcgtgccccggcttcgtctgcacggaactcccgtttgcgcgaaaaccacatggtgatcgcgctggccaggaaacccagcaccacttcggcgaagatggtcgccacgaagtaggcaatgccgcggccgccttcgttcttgaagatgaccttgtcgacaaagttgccgatgatccgcgcgaagaacatcacgaaggtgttcaccacaccctggaccagcgccaaggtgaccatgtcaccgttggccacgtggccgatctcgtgggccagcacggctttcacttcgtcgtaggagaagcgttccagcatgccctggctgaccgcaacgagtgcgtcgttcttgttccagccggtggcaaaggcgttggcttcataggccgggaagatcccgacttcaggcatcttgatgccggcctcgcgcgacaactcctcgacggtttgcagcaaccattgctcatgccgggtacgtggctgggtgatgacctgggtgctggtgctcatcttcgccatccacttggagatgaacagcgagaacagcgagccggcaaaaccaaagaccgcacagaagaccagcagctgattgaggttcaggtcaaccccgttggccgccatgaacccgttgaagccgaaaaggctcaaggtgatgctggcaatcagcacgaccgcaaggttagtggccaagaacagcaggatgcgcatcatggttgtagagttctcctcatgcttaatatgtcgcgtactgcggggtatataaggtgccgcatggggtgattcaaccgagcgactatttcaaactgtgtcctacagcctgaatgtagaggcttgaagggaatttccgatagggaaaaggtcgtttgatcggttcaccgttgccttgaagccctgtgattatggggtgtggggggctttttcggcgccagcgaggtggcaaggtagaagaggggcagagaagtgttgccagatactcgccgtacgaccgattgtcggtcgtacggcgccgtttcccttactggcgataggacttgaggaagttgccgatacgaccgatggccatgtccaggtcatccacgcgcggcaacgtcaccacgcggaagtgatccggccacggccagttgaacgcggtgccttgcaccaccagtagcttttccgacagcagcaggtcgagcacgaacttttcgtcgttgaggatcgggcataccttggggtcgatccgcgggaacgcatacagcgctcccatgggttttacgcagctgacgcccgggatcgcattgagcagttcccaagtgcggttgcgctgctccagcaggcggccttggggcaggaccaggtcattgatgctctggtagccgcccaaggcggtctggatggcgtgctggctcggcacgttggcacacaggcgcatgttggccagcatgtcgatgccttcgatgtagctctgggcgttgtgcttgggaccggagatggcgatccagccggagcggaaacccgccacgcggtaggacttggacaggccgttgaaggtcaggcacagcaggtctggcgccagggaggcagtgcatacgtgcacggcgtcatcgtagaggatcttgtcgtagatctcgtcggagaacaccaccaggttgtgctggcgtgccagctcgagcatgcccagcagcacttccttggagtaaacggcgccggtcgggttgttcgggttgatgatgaccagggccttggtgttcggggtgatcttggccttgatgtcggccaggtccgggaaccagtcggcgccttcgtcacacaggtagtgcaccgggtggccaccggccagggtcacggcggcggtccacagcgggtagtccggcgccggtaccagtacttcgtcgccattgttgagcagggcctgcatggacatcacgatcagttcggacacgccattgcccaggtagatgtcctcgatgccgacaccttcgacctgcttctgctggtagtactgcatcacggccttgcgcgcactgaacaggcctttggagtcgctgtagccttgggcagtgggcaggttgcggatcacgtcctggaggatttcgtccggcgcttcgaaaccaaagggcgccgggttgccaatgttcagcttgaggatgcgatggccttcctcttccaggcgtttggcgtgcttgagcactgggccgcgaatgtcgtagcagacgttggcgagcttgttcgatttgctgacctgcatggcgatgtgatcctgaaaatgaacgatccagacggtgtgggcactaccgtactgtgaatcctgcgaaggccgcacccataaatacgtttgaatgccggtagcgcgggtgccagactggcgttttgaagaggcgcaatcatacgtgccgcctgatccatggaaaagacacagatcaggctttttcagttgccgaggtgtaccgatggaaaagttgcagaaaacgctggaggaatggcgggaaatgctcgaccccgcgcaatatcaggtgtgtcgactgaagggcactgagcgcccgttctccggcaagtacaacgccaccaccacggatggcgtgtaccactgcatttgctgcaacgaaccgctgttcgattccagcaccaagttcgatgccggttgtggctggcccagcttctacgagccgatcgccgacagcgcgatgatcgagatccgtgacgtcagccacggcatgatccgcaccgaagtcacctgcgccaaatgcgatgcgcatctggggcacgtgttcccggacggcccgccgccgaccggcttgcgttattgcatcaactcggtgtgcctggacctcgtcccgcgttgaattgaacggcgcggcaccctgtaggagaccggattactggcgatggcgatctcacggacgctatcgccggcaagccgggctcctacaagggaggggtgatagcgagatatcaatttcgccaattaaattgagtacaatttaattgcatactatctttttccttcttccccccaatcgaggcactgccatgagcaacaacctgctgagcatcccttgcaccaccatcaagggtgagcaaaagaccttggccgatttcgccggcaaggccatcctcgtggtcaacactgcaagcaagtgcggtttcactccacagtacaaaggcctggagcagctctggcagcagtacaaggaccagggtttggtggtattggggtttccttgcaaccagtttggcaagcaagagcccggtaacgaaggcgcgatttccgaattctgcgagctgaattttggtgtcagcttcccgctgttcaaaaagatcgacgtgaatggcagcgacgcccaccctttgttcgtacagctgaaaaagcaggcaccgggcctgctgggttccaaggggatcaagtggaacttcaccaagttcctcattggccgtgacggccaggtggtcaagcgttttgccccgaccaccaagccgcaggacctgacccaagagattgaagccctgctcaaatgaccgtctccctggcgctcgaccatcaactgtgtttcaagctctacgcagcgtcgcgggcggtgacccgtgcctacaagccgatgctggatcaactcggcctgacctacccgcagtacctggtgatgctggtgctatgggagtggcatgccgcaacgccggcgcaacccacggtcaaggccttgggcgaacgcctgatgctcgactctggcacgctcacgccgctgctcaaacgccttgagcagctcggctgggtcaggcgccagcgcagcgccagggatgagcgcgaagtgcacctgggcctcagcgaaagcggtgtgcaactgcgtgaccaggcccatggcctgaagacccggctgctgtgcgacagcggtatcgacctgaaccaggccgacacgttgcgcgatggcctcgaccagttgctccggcagatcacagacttgtcgccttcggcacccacaggtccagcaatccgctgagctcctcgcggcgaaacggcttggccaggtagtcattcatgcctgcggcccggcaacgctcgcgttcttccgacagggcgttggcggtcagtgcgacgatcggcaggtccggccagcgcccgctgcgacggatctgtcggctggcctcgtaaccatccatcactggcatattgcagtccatcagcaccatgtcgaagggttgttcctcaagcagcctgagtgcttcgccaccgtgggcggccacgatcacctcacaccccagtttgccgagcatgcccttggccaccagttggttgaccgggttgtcctccaccagcaggatgcgcgcccggtgcatcaggggcgcagcgtccatctggatcgggtcgaggatcagttgcgcttcgctgcgcaggttacgttgcaggatctgatacagcgcgttgcggctcaacgggcgcgcctgttgctgcaacggtgccagtgccgcgacttcttcgctgggcatgaaattgccataggcggtcaccagcaggatgggggcgctaatggcggggcgcaggcggaacaggcattcggggcagtcggtgatcagcaggtccggggtttgcccgctcaagtcatcgtcttgcgtatagcagtgcggtgtcagcccccagtggggcagcagggtggtgagcagctcggtcaggccactgccgacactggtaatggcgatgacgtcacccttgagcggtgtcggttgcaccgcaggcaaatggatcggcaacggcaagtctgcgcagaattggctgccgaagcccacctccgagctgatgctcaagcggccctgcatggcttcacacaggttgtgcgtcaacgccaggcccaggcccgtgccgccaaactgacgggtgatgccggcaccggcctgggtaaagggttggaagattttcacctgggcttcctgcgcaatgccgatgccggtatcacacacctcgatgcgtacccggccctcctgcgcgctgaggcgaacatccacacggccgaagcgcgtgaatttcaaggcgttggacagcaggttactgacgatttgccgcacgcgggtcgggtcacccaagacctgggcgggaaactgcgggtcgatcaggcaggtcagttcgacgctcggcgccgcgttctgcgacagcaggttggcggtgtcttccaccagtgaacccaggtcgaacgggatgtgctccagctccaactggccggcgtcgaacttggacaggtcgaggatatcgttaagcaattccaccagcaccttgcccgagtcatgggcgatggacagttgctggcgttgctcggcgttgagcgggctgtccagcgacagcgcgatcatccccagcaggccattgagcggggtgcgaatctcgtggctcatgttggccaggaaggccgcccgcgcctgggccatgcccagtgcatgcatctttgcggattccagttcatcgttggactggctcagccgctggttgctggccttgagctccagggtgcgggcggagacgatgtcttccagttgccccaggtactcggtcagccgatcttcagcgtgacggcgttgctggatctccgtctccatgttctcgaactgctggttggcaacgttcaccagcacgccgatctcgtcgtgctcgtggcccggcgggcagtccaggcgggcctgccggcgattgctgagctcgcggatgatgcgcaccaaaggctgggtcaacatcacgtagaacaggcccagcaggatgccggtcagcaacaggctgcgggcgaagccgttgagtagcgtgatctcggcacggcgcagaaagcggctgccaaaggcgtaggtgtccacatccaggcgcagcaccccaagggactcgttgggcatgtgactgaggaacagccggtcctcaaactggcggttggcaccgaacaggaagtcgctgataggacggtaggtgctttctttgcgcgggctgtcgacatcggccagcaccacgccgttgttgtcgatcaactgggcgtgaacgatggcgggggagtgcaaaaggcccagggtcaattcctgggccagttcggcgtcgatgttgtaggcgatgcgtgacgcggggttgtggctgatttcgatcagcgagcgaatttcacggttgatggatgcgtcttcgctggcataatcgataccgatttggatcaggctgagcaaggttcccaagacgaaaccgaccagcacagtcaatctggcttgtttataagacaagcggtgggcgaacttgatatccatcgagtgttgaaccacttcacgtttcccttcgcccggcaagcatagctgaacatccacaagctctggcttacccggcatgaatcgttttttacgcagcctcgtgcggtctgccgcagggttgccaatacgccatcttttgcaagaacttgccagaggaataatcgtggactctcgattgaatgcctttcttgaacgggctgaaaccgtgctcgcccgcctggagccgttgttgcccgcgccgcgccaagccatcgattggaaccagtgcctggctgcgcgctggcagcgcgaaggccgcagtggtttcctgttgccgctggacgtgagcctggacatgcgcctgtccgacctgattggcgtggacaagcaacgtgaaacactggcgcgcaatacccagcaattcatcgatggcctgcccgccaaccatgcactgctgtggggttcgcgtggcaccggtaaatcgtccatggtgcgcgcgttgctggcccagcatgccaaggcgggcctgcgcctgatcgaaatcgagcgtgatcatctcgctgatctgccgcgtgtggtcgagcaactgctcaagttgccgcagcgctttatcctgttctgtgatgacctgtcgttcgaggccggcgaaggcgattaccgcgtgctgaaaagcgtgctggacggctccctcgaacaggctccggaaaacgtgctgctgtacgcgacctccaaccgccgtcacctggtcccggagaaccaaagcgacaatgacaactggaaacgcgtggatggcgagctgcaccccagcgaagcggtggaagacaagattgccttgtccgaccgttttggcctgtggctgtcgttctatccgtttacccaggagcatttcctggatgtggtggagcactggatcggtgagctggcgagcaaggccggtttgcaatggcagcgcgatgaagccctcgacatcctcgccgtgcgctgggcgaccggtcgcggcaaccgcaacggccgttgcgcgtaccaatttgcccgttactgggtaggccttaaattgttggagcttcaaccatgatcgatctaaatagcgcaggcaccggcctggatggctatgcgatgctctgcgcgcaactggagtcgctgctggccgatgagcgcgacttcatcgccaacagtgcgcagttctccgctttcctgttcaatcaactggacgacttgaactgggccggcttctatctgaaccgtaacgaagagctggtgctcggaccgttccagggccagatcgcctgtgtgcgcattccctttggtcgcggggtctgcggggcggcggccgcaacgcggcagacccagcgggtggaggatgtgcatgcgttccccgggcacattgcctgcgacagcgcatcgaacagtgagctggtggtgcctttggtcaaggacggcaagctggttggcgttcttgacctcgacagcccgtcgctcgcacgctttacgctccaggaccaggcgggcattgaacagctggcggcgattttcctgcgtctgaccgactgctgatcacgcaaggggcagcaatgccccttactgaccctccgggctgtggagttgcacttgcagcaaccgctccagttccagcatgaacttttccagggttttcgcacccgcctcgattaacgcccagtcatcaccacgggcacacgcctgttcgagggtttcgcactgcccggccaatgaggccgcctgaacaatacgggcggcacccttgatcttgtgggcctgctcaatgatctcctgaagcggggcgtgtgcggttatcagcgcggtcagtgcctggcgatcattccggctgctgctcaacagctcctccagcagtcgcccattcaactgtggatcgccgccggtcaacgcctcgaagttgccaaggtccaggtgcaagtccactgttttaggggcgatctgcgccagttgccgctccagggtcgtgaggctgatgggtttgaacaggcaatcgttcatgccggcctgagcacagcgttgtttctcttcaggctgtgcattggcggtaaacccaagcaccacgcacggtgccagttgctcgcgctgttcgtattcgcgaatcgaacgactcaactcgtagccattcatgatgggcatgttgcagtcggcgatgaccaagtcgaagcgttcctggcgccatgcctggaaaccggctgcgccattctgggctgcggtgaactggtggcccaggtagcccagttgctggcacatcagcaagcggttggcgggatggtcgtccaccaccaacacattgagtaccggcgtggttgcgggcttctcgggtttctgttcatcggctgcctgttccggctgcagtcgcggcattcgcaggttgacatgcacctgggtgcccaccatgggcacactgctcaggctcagctctccacccatcattgcgcacaggctgcggcagatcaccagccccaggcccgcgccgctcctggcgagctgcccggaattgtcggcctgggcaaagggttcgaacaggcgtttctggtcatcgcggctgatacctatcccggtatcctccaccaccagcttcatctcgacctgttgcgccagttcggtgggcaatacgtcgacgcggatttttacctggccacgttcggtgaacttgatggcattgctgatcaggttcgacagcacctgcttgaagcgcagcgggtcgatcaggacttcggtgtcgtcctggtcgggtttgaactcaagggacaggctgagggttttctggcgcgccaggccgtcgaagacacgcaccaccgactcgatcacctcgcgcaggttgacccgttccggcgccaggctcaggcggccggactcgatacgtgcgatgtccaggatatcgccgatcagctccagcaggtccttggccgagttgtacgcgacttcgatggccgggcgatccaggtggccatggtcggcgcgtttgagggtcagctccagcatgccgatcaccgcgttcatcggcgtacgtatttcatggctcatggtcgcgaggaacgtgctcttggcccgattggcttcgtcggcgcgctctttggccgcgcggatctcatcgaacaattggcggcgctcgctgatgtcaatccagccaccgatgatcccttgcacctccccggtagaatcgcggtagggcaggatccagtgatagatcgtcagtttttccccgcggatatgcagggtgcggtccaggatcagcgggttaccttcggccattacccgctggtagtcggcatggtactgctccgcgtccgtctccagggtttcgctcatctgcagggcacttttgccgatcacatcctcgcgcttgacctcaaacacttgcaggtagctgtcgttgcaggtctgcagcaggcctttacgatcacgcacatagatggggtgcggggtttcattgaccagcgcgcgcatgaattcgaactgatcgttgagggcccgctcggccatcttgcggtgcttgatctgacggcgcatgtaggcgttccaggccagggagatcagcagtagcagcccggtgccgatgatgatacgggctatcagttggtggtagtcgcgccagtagctgtcggaggcggcggtgtagccccgccagcggctgttgatcacccccagttcatccggggcgatgctcaacagggccttgtcgaggatcgagctgagttcggtggcactgcgcgatgtggccagggcaaacatggccgggaaggtgccgatgctcgtactcatctgcagcttgtcctggaacacctgggacgacaggaagtagttggcgaccaccagggagttcaccgcgccttccacgtgtccctgggccaacagttccgaagccttgaaggtgtcgctggcttttaccagttggacctggggaaagtcgcgacgaaggatagcctccagagggttgcccggcgtgattgccaggcgtttgccggccatctgctccaggttagagggggcattgggttctttgcgtgtcagcaggacataggagttttccaggtagggccggctgaagttcagttgcgcctcccgctcggcgctgggcacgatggccccgataatgtcggccttgccggtgtccacctgctcgatcattgcattgacgtcgcgttcgcgctggatctcgaagcgcagcccggtgcgcaggcggaccaactccagcaggtcggcggtgatgccgcgaaagttgccgtcggcatcaaaaaaggtcaggggtgcgaaggtttcattcacaaccaccttgactaccggatggtctttcaaccagcgctcttcgcgttgggtcagttgcagtttctggtcggacagcaagatgtcgctgccggcgctccagcgcttggcgatcatttcccgttcgttcatgggcacggtggtcagaaccgcgtcaacaatactcaagagggtgcgctggtgttggggcatggcaaagctgaacccgtaggcttcgtgtttaccgaagttggccatgcggatgttcttcaggtagcccttgttgatcatgtaatgggtggaaatggtatcgccgaggaacacgtcagcctggtcgaacgccaccgcattcagggcattttgataagaggggtaggcacggatgattgcctgggggtacagcttttccacttcgtccaggggcaggtagtggtagaccagggccaggcgcatgccggccaggccatcgttcaggctgcgggtttcaccttcgcgggtgaccagcaccggttggtcgacggcatagggttcggacagcgtgaggttcgggttcgccgcctcgaagccgttggaggagcccagtagatcgatatccccggcttcaagcgcgcggatcgccgcttcacgggaaggatagcgcagtactttcactggcaaggccagcgccttggccaacaggccggcgtaatcagcggtaagtccttcgtagtcgcgaccgctggacgtgaggtcgaacggaggatagtcaggggccgcagtgcccaataccagttcgcgcttgttttgcagccattggcgctgggccttgttaaggtttgtttccagttgaacggagcctgcacggctcaacaaggtgaaatgttccgggcccgtttgatggttcgcgagcacggcggtgctgaagcacaaaccggcactcaatataatcagatagtcctttatacgcctgggcatccgctttctcacactagcgcgtttcgttttgccatctcgataagttctaccaaggatttggcttgaagtttttgcatcagcctctttttgtaagtgcttactgttttgttgctcaggaacataccttttgcaatttccttattggtgcggccttgtgcaaaaagttgcaaaaccataagttcgcggtcgttgacgttcttgaacagttcaagttcctgggagtcgcagccgtctgcaccactgctgttcagtgcctggctgggaaagtagttgtagccggacaacaccgcgcggatggcgctcagcaattcgctcaggtcgccttccttgcacacgtagccatcggcgcccgagcgcatgcagcgtgtggcgaacaaggtgggggactgagccgtcaggatcagggttttcatttgcgtgttcatggcgttgaaccggcagagcacttcgagcccgtcgagcttggggatgctgatatcgaggatgatgaggtcaggcaagcattcgcggaccatttgtatggcatcgcatccgttgtccgtttctcccaccactttgtaaccttcgtgttccaacaacattcggatggcaagccgtataaccgggtggtcatcgataataaaaactgagttcatgatcacattccgtgcaagtgcaaataaagcgggcacattagctcagaaggggaggcgggagcatgagctcaggggggagtagatataaaacaggaaagttcctacattaaaaaaggtaaaggcctacccgttgctcaggctgtgcgaagtgatatgccagcgcttgtgagatgaatgaattaaatcttgccgctatggaattagctggctcggtactgagctttttcttcggggcctgatgtttaaaatcctacatgtgtgacctgagtaatgggcagatcaaacgtgccagctcatctttgttgagcggttttgacaaatagccgagcaatggcaggccacggtccaccgcttggtctatcagggcggcgagttctgtcgcgggcagtccactcaggaggatggcagttgtggtaaagcgtcggcgactggcgatttcaatcagctcgagtccaggcaggtcgggcaggcattgatcgcacaggatgatgtcgaagggcatctcggcccgcgacattaaacagatagcctgttcggcgttctcggcgggggtcacccgtgcgaagccgaagcttctgagcaggcactgggtggcgaggagttgaaagggatgatcctccaccagcaggatacgaagcggataactgggcattggggggcacacggtgagtcaagcgtcgatggagggcgcgtaggaacagttcgcctgggtcgcccggagcgtgcgtgagtattcattgggtgcttgtgcgaattcgatcaggccgctctgttcccttcgtaggtcgattcctttcgggcaacaggcggcttgatcgtgctcgtcattgggggctggagcgcccggtcatttcccgggccatttcggtggcatagctgtcggtcatgccggcgatgaagtcgatcatgcgcaggaacgaggcgtgcaaaggccaatgggggttcggcgcgttgttacccagcaggtcgagaatgcgccgattcttgaacgacggcgtacgcccgccatgctgctccagggctgcaccgcaaaaggcgttcagcagaatttccaaggtggtgtaggcgccgatttcatgcaatgtcttgcgcttgtcctggaagatcttcttgcgtgccatgtccttggcgtccagcacgcaacgcttggccgggccgtgcatgtgctccaccaggtcgccgggcagggtgccggcgagcaaggcatcctgttgttcgacaaaggcccgcgcggccgcgttggtcaggtgttcgatagccttgccgcgcaggatcgccaacttgcgccgccgcgagtcctgcgcaccgagttgacgataggtctgcggcaggtcatcgcctaccaggtcgagcagcaacgactcgacctcggtgtattccagcaactccatttccaggccgtcttccaggtcgatcaaggcataacagatgtcatcggctgcctccatcaagtacaccagcggatgccgggcccagcgctgttcttcgagttgcggcaggccgagcttgtgggcgatctgctcgaggatcggcaattcactctggtaacagccgaacttgtgtttcttgtagcccagggagtcggcgtggcgggcggtccaagggtatttcaggtaagtgcctagggtggcgtaggtcaaccgcgtgccgccgtcgaactggtgatattcaagctgggtgagcacgcggaagccttgggcgttgccttcgaagttgaggaagtcattacgctcggcgctgctcatgtcatccagccaaccgcggcctgcggcctgctggaaccaatggcggatggcgtcttcgccggagtgcccgaacggcgggttgccgatgtcatgggccaggcaggccgattgcaccaccatgcccaggtcgctcgggtcgcaccagtcgggcagggcgctgcgcagggtttcgccgacgcgcatgccgagggagcggcccacgcagctgacttccagggagtgggtcaggcgcgtgtggatgtggtcgttgctggagaccgggtgcacttgggtcttgcggcccaggcggcgaaatgcgccggagaagataatacggtcatggtctttgtggaacgggctacggcccagttcttccgggctgtgcagcggtttacctagacgttcgcgagtcagcagggtgggccaatccaaggcgggtactctccgtgcggtgaatgaccctcccagcttcccggttcagcgcgggctgggcaagcgaaaatctacagcccggccgcgtcgatatcgattaacagcaaacgctgaccgttatcaaagaattgtccggcggtgaggcaatactggttggtggtcgcgtcgcggtaggtcgaggagagggtcagacggcgctcgtcccacccttcggccaacaggtgatagaagtacgggcgccacgaccagttgtggcccagataaaggctgtcggcctgccaggcgtcctggcgccactcgaagttgggcgtcagctgagtgccgtgtcggtcgcattggtagaagcgcagcagccaggggaaagccggcagttggggcaactggctcagcggcgcttgtgcctgagcccaggtttgcaggattttcatcagctcggccaattgctggcgcaattgcatgatgcgcccgcgttccgccagtttttgctggacgtaggccgtgcgcaactgggcaaaacgtggcacgaaggcgtcggcggcaaaccagtccaactgtgcctgggcaaacagatagccctgcacataccgcgagccgcactccagggcgaagctcaactgtgcttcggtttccacgccttcggcaatgatccagcagccggttttctcggccatctgtgccagcgcccgcaccacttcgctgctgggcccaccgcgggcggcttcctggaacaggcgcatgtccagcttgagaatgtccggttgcaatgccagcacccggtcgagttgggaatagccggcgccgaagtcatcgatggcgatacgcgcaccggcctcgcggtaacgcgcgaccacgtcggccaggcgttggatgtcgccacccagttcggtgatctcgaacacgatccgctgcgggtcgacaccatggctatgaatctgtttcaggctcggcagggcttggcccggacgcaggcggttgatccagcgcggtgagatgttcaggctcaggaaccagtcggcgggcgcttcatgcaggcggctcagggcattgtcgcgaatctgccggtcgagacggcgcaaggtcacgcccggggtgcgcgggtcggcgaacagcggccccaccgattgcaggcgcccgtcggcctggcgcagtcggccgagggcctcgacgccggcgatgcggccggtggcggtatcgataaacggctggaagcaggcgagcggttgcccgtcgatcacggggcctccttaagcgaggtggctgaaaaaaaggcccggccctcgaaaacgagggtcgggccgattctgttagcaagaatgcagccagccaggctcaacttttgcgcgaagtgccctgcatggccaatttgatcagcgggatcaagccggcaccgagacgcaccaggcgtgtcaggctgctgataccgccgcccttggcgcctttgccggtaaaaaagcccatcagcgtcaccgcagccacgccccacagcggcgcgtgcttgatgcccaggctgtcttgccagtgactgcccaggttgcgcaccttgttcaacggcagcatcaattgctgggactcgtggcggatttcctgacggtgcatttccatgcgcaggcggatcaacgccttgcgcatttcccgccgtgacgtgttttttggcatttcagtcaggctcatggcagcaagcgctcccgatcattggccagttcttcgagggtggcatggaacggcgtggattcatcgaacaccgccgctttcaagcgcaccccgcaaaaggctgcggccaggctgtagaacacgcagaggcagatgatgccggtcaggcggtagccggtgtcccacaccaggatcatcaccagcgtcgacagccccaccagcaacagcaatgcaaacaccaatgccaggccggcaaacagcagcaggctgacggtgcgggccttctgttcctgcaattcgatgccaaacaattcgacgtggctgtgcagcaagcccagcacggccgcgcccagacgccttgaggtagtgcccgtggacgagccagtttcgccgatagacatgatttagcgccttgtggccagcaggccgatcagaaagcccacgccggcggcaatgcccaccgactgccaagggttggcctgcacgtaatcttcagtcgcggtgacggccgcctggccgcgttcgcgcagcgagtcttcggtcagttgcagggtttctcgggccttgagcaggctttcgtgaatcttgctgcgcagctcatcggcctggtcacctgccagcaccttggtgtcatccagcaacttttcggtgtcgctgaccagggtttgaaaatccgccatcagtatttcttgcgcagtctttgcagttcttctggccatggttatctccgtgatgggctgttttgtacgtagtggtttcgagtcaccggcgtcggtgaaggttcagtgcaattgtgtggtacagcttttgctttgccttggtgcgcaggccttgctgcctgcgctgaatccgggcggtcgggcaggaagccttgaaaaaccttaccctaaataactgaaactcgcggaaaaaccctgtcggcaacgacctgatgcgttgatcgctgcgctaaatcggttcacgccctctgaagaggggtggggccggcggtgccaatttagtgcgcgcaacccaggtttgaaccgctttggtgctttttgcctttactgcaggcctgccaacctccatggaaaatgtgcaaagtgcggtggacaccctgatccacagctccaataccctgtttatcctgatcggcgcggtcatggtcctggccatgcacgccggcttcgcgttcctcgaagtcggcacggtgcgccagaagaaccaggtcaacgccttgtcgaagatcctcagcgacttcgccatctccacactggcctatttctttataggctattggatctcctacggggtgagcttcatgcaaccggcggcggtgatcagcgccgaccatggctacggcctggtgaagttcttcttcctgctgacctttgcggcggcgatcccggcgatcatttccggggggattgccgagcgggcacggtttgcgccgcagctctgcgcgaccgcgttgatcgtggcgtttatctacccgtttttcgagggcatggtgtggaacggcaatttcggcctgcaggcctggttgctcgcgacgttcggcgccagcttccatgatttcgccggctccgtggtggtccacgccatgggcggctggctggcgctggcggcggtgttgctgcttggcccgcgcaacgggcgctaccgcgaagggcgcctggtggcgttcgcgccgtcgagcattccgttcctggcattggggtcgtggatcctgattgtcggttggtttggcttcaacgtgatgagtgcgcaaacgttgaatggcgtcagtggcctggtggcggtcaactcgctgatggccatggttggcggcaccgtcgcagccttgatcattggccgcaacgatccgggtttcctgcataacggcccgctggccgggctggtggccatttgtgcgggttccgacttgatgcacccggtgggcgcactggtcacaggggccgtcgccggtggtttgtttgtgtggttctttatcgccgcccaggatcgctggaagatcgacgacgtgttgggcgtgtggccgttgcatggcctgtgcggcgtgtggggcggcattgcctgcggcatcttcggccagacggcgctgggtggactgggcggtgtcagcctggtcagccagttgatcggcaccgcccttggcgtgttggtcgcgttggccggcggcctgctggtgtacggcgtgatcaagcgcgtgcatgggctgcgcctgagccaggaagaggagtattacggcgcggatctgtcgatccataagatcggcgcggtcagtcaggattgatcggctcgtctgcctggcgataaaaaccgtgcagcaggcggtagcggttctgtcgtacttcatcgacccgcgcctgcacctgttggtccggcaggcccaatagaatcagggcgtgggaggcaagcatcaggcttgactccaatagttcgggcaccacttcgctggcgcctgcggccttcagctcagccagttggctgtcgtcgcgggtgcgtaccaggatcggcacttcggtgttgatccggcgtgcttccttcaacaccaccagcgcgacatcggtgttgtctacggcaatcaccaccaaccgtgcgcgctccaggccgaccgcactgagcaatgcgccacgccggcaatcaccgtagtgcacgctgctgtcttcggtggcggcttcctgtacccgttccgggtcgtcatccagagcgatgaatgcctgttgttccttgcgcagaaagcgtccgatggattggccgacgcgaccatagccgcagatcaccgcgtggccgtgcagctcggcgttgagcgcggtgatggcttccagttgcacttgctggttgggcttgcggtgcaggcgcagagcaatgcccggcgcggcacgcagcagcaggggtgtcagcagcatcgagcagaaggtggcggcgagcagcaagccgttgaattcatccgggatcagtcggctctgctgcatctgtgccatcaacgcaaagcagaactcgccgccctgggccagtgccaggccgctgcgccaggcggtttcgctgtcgctgccgcgcagcttgaccagcgcggcgaccacacagcccttgaccagcatcagggtgagggtcagggcgaggatcaacaggctgtggctgacgaacagttgcaggtcgatgagcatgccgatactgacgaaaaacagccccagcaggatgtcgcgaaacggacggatatctgcctcgatctgatggcggtagtggctttctcccaacagcatgccggccaggaacgcgccgagggcaggggagagccccagcaggtgcgtgagccaggcggtcagcaacacaatcaccagcgccagcagtacaaacagctcggccgagtgcgaggcggccacctcatgaaacaagcgcggcagcagccagcgactggcaagcagcaggccgacaaacaacaccacggtcttgcccagggtcagtggcagcgcccagtaccaggcttgttcgccggtgccggcaaacaccggcaccagggtcagcaacagcaccgccaccacgtcctggaacagcaacacgccaatcgcgttctggccatggctgctgaagatttcaccgaggctggtcaactccttgctgacgatggccgtggatgacagcgccagccctgcgcccagtaacaacgcgatacccggcgccacccccaggatcatcaacaagatgcccagcagtgccccgcagcccaacacctgcagactgcccaggccgaacaccacgcggcgcagggcgagcatcttggtcagggaaaattccaggcccagggagaacagcaggaacaccacgcccagttcggcgaggtcgggcagctcctcgctgtcattcacccagtccagcgcggtaggccccacggccaggccgacgcacaggtagcccagcacgggcggcagttgcagccggcgaaacagcgcaatcaccaccagggatgaggccagaatgatcagcaggttggcaaacacacgcatctccattgcaagggggcaggcaaaaagccgcgagaatcgctgaaacagttataggccatggtgacctgggtcagggttttcaggggctggtttctcgccacaggttttcgtcaggcttagaatgttggcctactttctgatcaggtccattcgtcatgcttcctgaatgccagttgttcggcaccctgggttgccatctatgtgaaattgctgaagccgaaatcatgccgctcgtcgaacacgggttgctggtggagctggtggatatcgccgaccccgacgacctgaccgaagcctacggcctgcggattccggtactccgccgggtggacacgggggcggaactggattggccatttgactcacaacaggtcgtggccttccttcgttgagtttatgcgatggcaggtttccaaatattacgttactgtatgtttgtacagcgattgaatagagggagcgcccgtggtgaatgttgaacaactgaaaagcagcgtcaatcgcatgtctgccgacgtcgtgcgcgacgcggtgaacgagctgcgcctcgatggcctggtcacggaaggcaagacgccttttaacaaggtgcatttcaatacctgctttgccgagatcgaggcgctgttccagcgcgccggttaccacaagcagctggatgtggtgggttaccagggcttgttgtacgcgttgtacgatccaggccgctgggaagccgtggacgtgttgcgctggctcaaggaattcaccgaggccgcgagtgcctcgccgatcctgcgggcggagttggccaaggcctgaatccgccctaggctcaatcccgcccgatgcgggataatgcccgccggttttcccaggctttgagcatttcatgtcgacttccgtttttatcgcctccgagcgccaagccagcaccctgtatttgccgcccggtccttgggcgacggtgctcgattgcctgtgcgagcacttcccggcgatcggccgcgaacagtggctcgaccgcatcgcccgtggccgggtgctggacatcgacggcagccccatcagcctggacctggcctacaaggaaggcctgtgcatctattacttccgcgaagtgccgaacgagaaagtcatcccggtgcaggaaaccatcctgtacgccgatgagcacctggtggtcgctgacaaaccgcacttcctgcccgtgacccccgccggtgaatacgtcgagcaaaccctgctgcgccgcttgattcgccgcctggacaacccgtcgctggtgcccttgcatcgcatcgaccggcacacggcggggctggtgttgttctcggcccacccggccagccgctcggcatatcagcaattgtttcccacccgccagatcgacaagttctacgaagccatcgctccggccctgccgaacttgacgttccccctggtgcataaaagccgcctggtcgatggcgagccgttctttcgcatgcaggaagggcctggcgcgagtaacaccgaaacggcggtggaagtgcgcgaaaagaacggcgatctatggcgctatggcctgtttcccgtcaccggcaagaagcaccagttgcgtgtgcacatgagtgccctcggcgcgagtatttgtaacgacccgttctaccctgacgtgatcaaggacgcggtagacgactacgccaacccgctgaaactgctggcccagggggtgcggtttatcgacccggttacgggcgaagaacgcagtttccgcagccggatcaccctcgactggtaaccgccagaaacgacaaggcccgcgcgaggcgggccttggattaaccggatagctggggctttctgatactgcgtggtgtcccgttcagggcggcttcgccacccagcgcggggcaagcccgctcactacaggtctttgacggtgcgaacctgatccttattgatgcgggtgcgcttgccgtcaagttgttcgaattcgtagaaacccgaatcttcattgtatttcggggtgtcgacggcctggatttcgcgaccgtcattcagggtgatcactgtcggcgaggcgcaaccggcgagggtggcgaggcccagtgcaagcatgagagcggcgatggtccgttgagtcatgagtttgtctccgagagaattcttttaaatagctgaccttgtgacgcgcagggcatcgacaaagttcctgatgcgaggttcattctgacacgcccgagcgcgtctgtaacagctccggcgtattaaggttggccaggcgcgggtcatccgccgggcactcaaggcccatgccgcccagttgcaggaagagcttgcgcgggctgcgctcaccggcgtgccaggcgcgctccaccgcgtcccgcagggcggaggggaggatgcagatcagcggctcccagaactcaccatggcgcaccattaccggcagcagcgggttgcgccgtgcagtctcacacaggtcagcgagcaaccctgcgtcgatatgcggcacatcgcacggcagtatcagcaggtgcgcgtggcgcgcggcggcgagtcccgcacggatgccggcgagggggccgggaaagtccgggctgtcgtcgttgaccaattggtcggcatacgcggcgtagtgttgcgggttgcggttgcaggagatgatcaagtcatccgtcagcggccgcaccaggcgctgcaaatgggcgatcaggggctggccgtgccattccagcaggcctttgtcctggccgcccatgcgctggccacgcccaccggacagcagcaagaccgaacagggcaggggcgatgaatcgataggcatgacggttccgcagcggcagcaaaaggggggcctgtgatataacatcgggctgttccttcgacaaccggaccgtgccatgaaagccaaggcagatgcgcccttcgtacccctgaacatcgctgtattgactgtcagcgacacccgcaccctcgacactgatacctccggccaggtcttcgtcgaccgcctcaccgctgctggccacaacctggccgagcgcgtgctgctcaaggacgacctctacaagatccgcgcccaggtcgcccactggatcgccgaagacgtggtgcaagtggtgctgatcaccggcggcaccggctttaccggccgtgacagcacccccgaagccgtgagctgcctgctggacaagcaggtcgatggttttggcgaactgttccgccagatctccgtggcggacatcggcacctctaccgtgcagtcccgcgccctggccggcctggccaatggcaccctggtgtgctgcctgccgggttccaccaatgcggtgcgtaccggttgggacggcatcctcgccgagcaactggacaaccgtcaccgcccgtgcaacttcgtcccgcacctgaaacaggccgagccttgtgaatcccgtgggtaagcccggcaagaccggcgccctgatgccggtggaagacgcgttggcgcaactgctgaccatggccgaagccgcaccgatccgtgagcagcaaaccttgcccctggcggactgcgacgggcgggtattggcccaggacctggtctccaccctcgacctgccgccctggccgaacagcgccatggacggctacgccgtgcgtctgtcggactggatcggcgaacctatggtggtcagccagcgcatcttcgcaggccaggcgccacagccgttggctgccggcacctgcgcgcgcattttcaccggagcaccggtgcctgaaggcgccgactgcgtggaaatgcaggaaaacgccgtggtccacgccgatgagcgcctgagcttcaccgagccgctgcacctcgaccagaacatccgcccacagggccaggaaaccacggctggcgagttggttttgtcggccggcacgcgcctgggcccgatcgaactcgggcttgccgcctccctggggcgcgactgcctggaggtggtgcgccgcccacgtgtggcggtgctgtccaccggtgatgaactgatcgagccgggtttgccactggggccgggccagatctacaacagcaatcggcgcgtgctgtgctcgtggcttgcgcgcctgggttgtgaagtgatcgatgccggcatcctgcccgacgacctggagcaaacccgcacacgcctgggcgacctgggcagcgtcgacctgatcctgtcgaccggcggtgtgtcggtgggcgaggcggatttccttggcatcgccctgcgtgaagagggcgagttggccctgtggaaactggcgatcaaaccgggcaagccgctgaccttcgggcacttccgtggcgtgccggtgatcggcttgccaggcaacccggcgtcgacgctggtgacgttcgcactattggcgcgcccttatctgctgcgccgccaaggtgtgcaagaggtggagccactgcgtttcgaggtgccggtgggattcacctggccaaaaccgggtaaccgccgtgaatacctgcgtgggcgcatcgagcagggcaaggcgatcatctaccgcaaccagagctccggcgtgctgcgcagtgcggcgtgggcggaggggtttgtggaggtgttggaaggcacgacgctggcgatcggcgatcgggtcaacttcatcccgctcagtgaagtcctgaactgacccaatccaaatgtgggagggggcttgcccccgatggcggtgtatcagtcaacttaagtgtgactgacactctgaagtgcgccccaaaagttggacacccatccaactcctggggctttttcatgagcaagtacacgacgcaattcaagctttccgccattactgcctttcttgagcgaggtcgcggctttcgtcgcatcgccgctcaatttcaaatggaccccaccctgcttcgccgttgggtggaggcttaccggttgcacggcgagaccagtctgagcagtactggtggacgctacagtgctttgtttaagttctccgtcctacagcgcatgtggcgtgactccctttccctgcgccgcgcagcagcgcttttcaatctgggtgactctacccaagtgggaagatggcagcagcagtattacagtggcggcattgaagccctggccccagggaaaaaaggacggaccaccgcgatgcccaagccacctgcgaaacctcgtaaacctgccggcacactcaccaaagaggaacttgcacataaagccctgcttgatgagcttcaatacttgcgcatggagaacgcctacctaaaaaagcttggggagttaggcgaggcagtgatgaggcgagagaaagaagcgaagaaaaagctcgaatagtcaccgaactgaggcaagactttcccttgagtgacttgctcaaactgctgggccttgcgcgaagtacgtactactaccaactcaaaatcatggacactgcagaccgattttcctcggtaaaagcctctatccagagccttcaggaagagcatgaagggcgcttgggttaccgtcgtatgactttagaactacgtaaagaaaggccgccgatcaacggcaaaacggtacggcgactgatgggagtgctgggtctgaaatgcacagtacgaccgaagaaatacagagcgtataaagggccgatgggagaggtctcgccaaataaattggctcgccagttcgaggctgaacacccgaatcaaaaatgggtgacggatatcaccgagttcaaagtagctggaaaaaagctgtatctgtctccaattttagacttgtacaacggagagatcgtggcttatcagacagccatgcgccctcaatacgctttggttggcgacatgctggaccaagcgtttaagcgcttgcccgagggagcaaagccaatgctgcactcggatcaaggctggcattatcgatactcaaagtaccgggaacgactggaaagagagggcgtggaacagagcatgtcacgccgaggaaactgctatgacaatgccacaatggagagtttctttggcacgttgaagtcagagttttattatcgggaacgcttcgatagcgtggcccagttgcaagccggactcgataaatacatccattactacaatcataaacgaatcaaaaccaagcttggcggactgagccctgtagagtacagagcccggtccgctaaggcctagacaataactgtccagcttttggggcgcacttcactctgctatcgggggcaagccccctcccacatatgattcttcatatgcctcagtaatcgtcgccgcgctcggtgatgtcgcgctccaccggccccgcattcgggtcataccccaccgggaacttgcccttcagcgtccacgcaaacgcaatgatctcggcaatcgtgcggtacagctcctcgggaatactgtcgcccagttccatccgcgccagcagcttgaccagctcggcgttttcgtagatcggtacttcgtgttcccgcgccagcttgaggatcgcttcggccagggcgtcgtcgcccttggccgtcagggtgggggcctgctggccgtcgtacttgagggcaatcgcctggcgcggcggtatcgggttcttcatgcggtttcatccacccagcgttgttccagcccggtttttggcccgcgcggcggggtgccgaggtggcaatcgaggtcgccgacgttgatgcccgaggtcaccaggcgttcgcgcaggttgcccaagtggctttcgatcaggctggcggtgaagggccgcgaggcccacagctggctggacagtttgccctggctcagttgcgcctggacctgcaatggccccagcggctccatgtcgaaggccagctcgacgcgccagagcatctgcttggcgtccttcttgtccttgcgttcgggctggtccttgtccggcgccggttcctcgcgctggaacttgacctgcaacggcactatgtcttgcaaggtgcgcatggggatttccagctgccaggtggtttgcaagcggccgtcggcggtggtgccggtctgttccaggctcgacagctgatggctttgcagccgtgaaattgcgccggcggccaggcgcagcaggttttccaggtcgccttcaccttccagtttcgccatcagccgttcgggcagcgggaagccggcgggtagttgccgggcgctgacctggccaagtgtgttcagtgggctgcgcacgaagttgggcagcacctgggccagggtgttggcggcgaggatcgcggtcatgctggtgctggcgggcagggcgggcagcaagtccgcgaccaggcgcagcaacgcgcctttcatgtccagcggcgggatttgcgggttctgcccggcgagcagcttggcttcaagaaaggcgccgctgttctggatgacttgcgccagtaccttggggttgctgacttgcgccaggtccggcaaagcagccaacaggcgctcggcggcggagcgcagatcggcggaggtgctgtcgccgcgaggcaggttctgcagggcggtgaagacagcatccaacgagccctggcgactttgctgggtcgacagttgctggctgaccgccagttgatccttgagcccgctcaacggcacaaagctcagggtctgcgcgttttgcaccacggcgctgagcaggctgccgacgcgcaggggctgagggctttccacggtcagggtcgcgcccgccagggcgttgttgagcacagtgaccagcgagcggtagatcgccggctgcgcggtgccctggggcagcatctgggtagtcagcaccttggcctgcaacagcgtgcccaccggtatctggttggtgtcaatgcgggtgagggcggcgacattggcgctcaaggcctgctgcaggctgagggtcaggttacccgcaggcgtctggctcaccgccacattgctgcccagcggcagcggctgcgggctgctggcctgcaccagggtctggcggccgccttccagggtcaacttgagcagcaactggaaggcctcgccgccttgtttcagggcgatgacttcggcgtttgcggttttcccggggtcgatcaggccgatctgcggctccagcagtttcagcaactcaccggctgcgggcgcagggccaggcccggctgcaggggcgggtgcaagcgtaggaaggttgatctcaccggtcatcgcgcgcgtcgtctctggggaaattgccctctttagagtagggcatcacatgtataatgccgcccgtctgcaaagagagcggtaaaaacctcacaactatttgatccagctctctaaaatcggtcgccaaagccgttattgtgcatttctctttaacggccgctgcaccgccgacttgaaccgtaaaggcccgcgatcttttgaccagccctcttcttgaagccgtagcgcttgcctgtgaacgcgacctgcgcctgctgttcgagcacctcgaactgcggctgacgggcggcgacatggtgcagatcagcggccccaacggcagcggcaagaccagtttgctgcgcctgttggccgggctgatgcagccgaccgccggtgaagttcgacttaacggcaagcccctcaacgaacaacgcagcgaacttgcccgcaacctggtgtggatcggccacgccgccggtatcaaagacgtgctcaccgctgaagaaaacctcagctggctcagcgccctgcatcatcccgcttcccgcgaggccatctggcaggccctggccgctgtcggcctcaagggtttcgaagacgttccctgccacaccttgtccgctggccaacagcgccgcgtggccctggcgcgtttgtatctgccggggccgccgctgtggatcctcgacgaacccttcaccgcccttgataaacaaggcgtcgcccagttggaagagcacctggcccaacattgcgagcagggcggtctggtggttctcaccactcatcacaccctcaatcgcgtgcccgccggttatcgtgacttggacctgggccggtggtcggcatgagcgtcttcgccctgttggtcgcccgcgaagcgcggctgctctgccgtcgtccggccgaactggccaacccgctggtgttctttgcgattgtcattgcgctgttcccgttggcggttggccccgagactaaactgttgcaaaccttgtccccgggactggtgtgggtggccgcgcttttatcggtcctgctctcgctggacgggctgtttcgcagtgatttcgaagacggctccctcgaacagtgggtcctttcgccgcaccccctgccacttctggtactggccaaggtactggcacactgggctttttccggcctcgcgctagtcttgctctcgccgctgctggcaatgatgctcgggttgcccaccgaatgcctgccgatcctgctgctgagcctgttgctcggtacgccggtgctcagcctgttgggcgcagtaggcgcggcgttgaccgtgggtttgaagcggggcggcctgttgctggccctgttgattctgcctttgtacatcccggtattgatcctgggcagcggtgccttgcaagccgcgctcatgggcatgccggcgaccggttacctgttgtggctgggtagcctgaccgccctggcggtcaccctgacaccctttgctatagcggccggcctgaagatcagcgtcggcgaataatgaggtctgactaagtgttatgtcttagtcagtaaagaccctaagcttttcgcaacgacgaaaagcaaccgtgatggaaacagcaatgaactggacctggtttcacaagctcggctcgcccaaatggttctatggcatcagcggcaagctgttgccgtggttgagcgtcgccgccgtgttgctgatcggcatcggcctggtctggggcctggccttcgcgccgccggactaccagcaaggcaacagctttcgcatcatttatatccacgtacccgccgccatgctggcccagtcctgctacgtgatgctggcggtgtgcggcgttgtcggcctggtgtggaagatgaagctcgccgacgtggccctgcaatgcgccgcgcccatcggcgcctggatgaccgccgtggcgctggtcaccggcgcgatctggggcaagcccacctggggctcgtggtgggtgtgggatgcgcgactaacgtccatgttgatcctgctgttcctgtacttcggtctgattgccctgggcaacgcgatcagcaatcgtgacagcgccgccaaggcctgcgcggtgctggcgattgtcggcgtgatcaacatcccgatcatcaaatactcggtggagtggtggaacaccctgcaccagggcgccaccttcaccctcaccgaaaagccggcgatgcccgtggagatgtgggcgccgctgctgctgatggtgctggggttctactgtttcttcggcgccgtgctgctgctgcgcatgcgcctcgaagtgctcaagcgtgaagcccgcaccagttgggtcaaggccgaagtgcaaagcagcctgggagcgcgtggatgagttttgcttctttcagcgagtttctcgccatgggccatcacggcctgtacgtctggaccgcctatggcatctgcctggcggtgctggccctcaacgtcgccgcgccgatcctggcccgcaagcgttacctgcaacaagaggcgcgtcgtctgcgccgggagaccgaaaagtgaatccgctgcgtagaaagcgtctgttgatcatccttgccatcctggtgggcgtcggtattgccgtgggcctggccttgagcgccttgcaacagaacatcaacctgttctacaccccgacccagatcgccaacggcgaagcgccggtggacacgcggattcgcgccggcgggatggtggagaagggctcgctgaagcgctctgctgactccctcgacgtgaccttcgtggtcaccgacttcaacaaagccgtgaccatcacctaccgcggcatcctcccggacctgttccgcgaaggccagggcatcgtcgccctgggcaaactcaacgccgacggcgtggtagtggccgatgaagtgctggccaagcacgatgaaaaatacatgccgccggaggtcaccaaggccctgaaagacagcggccaatccgcgccaacgcctgccaaggagggctaagccatgacgtccgcactgtttattccggagctgggccagctggcgatgatcctcgccctgtgctttgccatcgtgcaggccgtggtgccgttgctcggtgcctggcgtggtgaccgtttgtggatgagcctggcgcagccggcggcctggggccagtttgctttcctgctgttcgccttcggctgcctgacctacgcgttcatgaccgacgacttttccgtcgcttatgtggccaataactccaatggcgccttgccctggtacttcaagttcagcgccgtgtggggtgcccacgagggttcgctgctgttgtgggcgttgattctcggcggctggacctttgccgtgtcggtgttctcgcgccaattgccgcaagtgatgctggcgcgggtgctggcggtgatgggcatgatcagcatcggcttcctgctgttcctgatcatgacctccaacccgttcagccgcatcctgccgcagattccggcggacgggcatgacctcaacccgttgctgcaagacatcggcctgatcgtgcacccgccgatgctctacatgggctacgtgggtttctcggtggccttcgcctttgccatcgccgccttgcttggcgggcgtcttgatgcggcctgggcgcgttggtcgcggccgtggaccatcgtcgcctgggcgttcctcggtattggtatcacgctgggctcgtggtgggcctattacgaactcggctggggcggctggtggttctgggacccggtggaaaacgcctccttcatgccctggctggtcggcactgcgctgattcactcgctggctgtcaccgagaagcgtggcgtgttcaagagctggaccgtgctgctggccatcgcggcattctccctcagcctgctcggcaccttcctcgtgcgttcgggtgtgctgacgtcggtgcatgcgtttgcgtccgacccggagcgcggcgtattcatcctgatcttcctgctgttcgtggtcggtggctccctgaccctgttcgccctgcgcgccccggtggtcaagagccaggtcggctttaacctgtggtcgcgggaaaccctgctgctgggcaataacctggtgctggtggtggccgcgtcgatgatcctgctcggcaccttgtatccgctggtgctggatgcgttgagcggcgccaagctgtccgtgggcccgccgtacttcaacgcgttgtttatcccattgatgggcctgttgatggtggtgatggcggtcggcgtgctggtgcgctggaaagacaccccagtcaaatggctggccggcatgctgatgccggtgctgctgggcagtgtggccctggcggtgatcgccgggtttgcctacggcgacttcaactgggcggtgctcgccactttcctgctcgccgcctgggtgttgctggccggcgtgcgcgatatcttcgacaaaacccgccacaaaggcctgatcaaaggcctgccgaccctgacccgcagctactggggcatgcaaatcgcccatatcggcatcgccgtgtgcgccctcggtgtggtgctgtccagccagaacagtgccgaacgcgacctgcgcctggcgccgggtgagtccatggacctggccggttaccacttcatcttcgaaggcgccaagcacttcgaagggccgaacttcacgtcagacaaaggcaccgttcgtgtcgtgcgcaacggcaaggaaatcgccgtgctgcatccggaaaaacgcctgtacaccgtgcagagttcgatgatgaccgaagccgggatcgatgccggtttcactcgtgatctttacgtcgcactgggtgaaccgctgggcgacggggcgtgggccgtgcgggtgcatgtgaagccgtttgtgcgctggatctggttcggcggcttgctcaccggctttggtggtttgctggccgcgctggaccggcgttatcgggtcaaggtcaagagccgggtgcgtgaagccctcggcctgcaaggagcggcggcatgaagcgttggttgatggtagtaccgctggcgatgttcctggtggtggcggtgtttctgtatcgcgggctgtacctggacccggccgagttgccttcggcgatgatcggcaaaccgtttccggcattcagcctgccgaccgtgcagggcgacaagaccctgacccaggccgacctgctcggcaaaccggcgctggtcaacgtgtggggcacctggtgcatctcctgccgcgttgaacacccggtgctcaacaagctggccgagaagggcgtggtgatctatggcatcaactacaaggacgacaacgcagccgcgttgaaatggctggcggaattccacaacccgtaccagctggatatccgcgatgaagacggcaacctcggtttgaacctgggcgtgtacggcgccccggaaaccttcttcatcgatgccaagggcgtaatccgcgacaagtacgtcggcgtgatcgacgaagtggtctggcgcgagcagctcgccgccaagtaccaggccctggtcgatgaggccaagccatgaagcgtctgttagccgctgccgttttagcgttgggcctggcaagcgtggcccacgccgccatcgacacctacgaatttgccaacgacgccgagcgcgagcgtttccgcgacctgaccaaggaactgcgctgccccaagtgccagaaccaggatatcgccgactccaacgcaccgatcgccgccgacctgcgcaaggaaatcttccgcatgctgggggagggcaaggacaaccagcagatcatcgacttcatggtcgaccgctacggagatttcgtgcgctacaaaccggcgctcaccggcaagaccgcgctgctctggttcggccctgccggactgttgctggccggcgttgtcgtaatggccgtgatcgtgcgccgccgccgcgccgcgccaaccgatggttccgacgcgctgtcccctgatgagcgtaaacgcctcgaccaattgctggacaccaagactgatgattgatttctggctcgcagccggcctgctgcttctgattgccctgagtttcctgttgatccctgtcctgcgcgaccgccgtgcccagcgtgaagaggaccgcaccgcgctgaacgtggcgctgtaccaggaacgcgttgccgaactgcaagtgcagcaggacgaaggcgtactgaatcccgcgcaactcgacaccggccgcgccgaagctgcgcgcgaattgctggccgacaccgaaggcgtggaaaaaccccgcgaatcgcgcctgggcaagccgctgccgttgttggcggcgtttctagtgccggtcctcggcgttgccctgtacctgcattacggggccagcgacaaggtcgaactgacccgtgagttctcccagccgccggtgtccatggaagacatgacccgtcgcctggaacgcgccgccgctgcccagccggactctgcggagggcctgtatttcctcggtcgcgcttacatggcccaagaccgttctgccgatgccgccaaggtctttgaacgcaccgtggccctggccggccgccagccggaattgcttggccagtgggcccaggcgcagtacttcgccgacaacaaaaagtggtcgcccaaggtccaggcgctgaccgacgaagcgttgaagctcgacccgaaggaagtgaccagcctgggcctgctgggtatcgccgcctttgaaggtcagcgctatcaagaggcgatcgactactggaatcgattgctggcccaactgccaccggacgacaactcccgtgcggcgttgcaaggtggcatagatcgcgctgctgagaagctgaaagaaagcggcggtaccgtcgcccctcaaaaagccgcgatgaaggttcgggtagatctgagcgccgacgtgaaggccaaagccctgcccactgacagcgtgttcatctttgcccgtgcggtctccggcccaccggcgccattggcggccaaacgcgtcacggttgccgaactgccgatcaccgttgaactgggcgatgccgacgcaatgatgccgcagttgaaactgtccaacttccccgaagtccaactggttgcgcgcatatcccgggccggtcagccgaccactggcgagtggatcggccgcagccaccccttggccagcagcaccactgccttgcagcagctgaccattgacagtccggaccagtaatttcgaggaaacgcttatgaccgcactcgcccgaatcaccttgctcagccttgtattgggcctgagcgcatgtgcggtccaccgcccacctcctgcacccaccgggccgaccatcccgccgtccccgtcgacccagccgagcaccaaaccgtcgggcccggtgaccccgccgccgaagccggtgccgaccaaatcgccgacgttcgcgccgcccccaggtgccgccagccattgggacggcaagatgcaggtgtatgtgctggacgaccagcccgacaccttctaccgccagcgtacgtattaccgctggagcaacggctggagccgctcgatcagcccgaacgggccatgggaagacaccgacgtgcacggtgtgccgccggggttgagcaagcagtacgcgcaatgaaaaaaggcgacctattacaggtcgccttttttgcgctttaaaatccgctctctcaaccaccggagatcaaaggtgggagggggcttgcccccgatggcaatggggcattcagcccatcactgactgatccactgccatcaggccaccggacactcccgattcagcgcttcatccaccaacaactgcgcaatctcgatcatctgcaccaccgccaacacctgcttgcggcccgagccatccaagtgctcggcacagtcgtaggcacacacagtcgccgattccagcatctcgctggcattgctcaaggccgcttcggtgctgaggccggggcggacggtgaagatgaggtggggtggggtttgtggtgtgtcatccgaggtggatggcgggggatttggagtaacttttttcatgcagtaaatctccattcagttggagctcaccccatccgcgaccaagcagaagggtggcgagctgtacgcaggttggtcgaccagggaatggaaacccggcagggcctaggccctcccacgcacagctcgccataacgcgagcacaataatgccgcttgcgcggccctgtgcgccattctaatccaggcgaccaagcctgatcgctgatgagcagcgattgcgagaggctaatggtgcgttatagcaaccgcaaccgacagagaaggtaggaaaaatcgcatatgttgtggtgagcagggctgttgtggcgagcaggcttgccctgcgttgggctgcgaagcggccccaaaacctggcgacgggttctgtctgaaataacgcggtggtttcatcagggctgctgcgcagcccaacgcggggcaagcccgctcgccacagggttgatctgagtttcggtcaagtccaacctttcacaaaaccttcatccaaccgcccccctccagtcatgtgcaagtcatagggctgacacctcccgcgcctactgtcgtttgaactcaaccgcagccatcccaggctgttcaaacaagacagagaagcccatgaatcacgctatccatgtcgatcacttgaacaagacctttgcgaagaaatccgccttggtcgacctcgaactcaccattgccccgggtgagatggtcgcgctgattggcgcctccggttccggtaagtccaccttgttgcgccacctggcgggcctggcctgttgcgacaaaagcaacggcggcagcgtcaaggtgttgggccgggaagtgcaggccagtgggcgcttgaacggcaaggtgcggcggttgcgcgcggacatcggctatatcttccagcagttcaacctggtcaatcgcctgagtgtgctcgacaacgtgctgctcggttgcctgggccgcatgccgcgctggcgtggcagcctcggcttgttcaatgccgaagaaaaagcgtttgccctggagtcgctggctcgcgtcggcctggccgatctggcggcgcaacgggcctcgaccttgtccggcggccagcagcagcgcgtagcgattgcccgtgcattgacccagcgcgccgaggtaatcctcgccgacgaacccatcgcctccctcgacccggagtcggcgcgcaaggtcatggagatcctcgccgacatcaaccgccgcgacggcaagaccgtggtggtgaccctgcatcaagtcgattacgccatgcgttattgcccgcgtgccgtggccctcaaaggcgggcgcattcatttcgacgggcagggcagtgcgatgagcagccagttcctcaacgatttgtacggtgccgacgtcgacaccagcctgatgttttccgaccagacccgccacgccaccgccacccctcggctggccttggcgcgcgcttgaaaccttactcacgacccacaggaagcctttccatgttgaaccgtatcggccatgtgtttctgtctgccgtattgctggccagtgtcgcgctgggcaacgcccacgccgctgacaaggtgatcaacttcggcatcatgtccaccgagtcttcgcagaacctcaagagcatctggcagccattcctggatgacatgcacaagaagaccggcctgaccatcaacgccaccttcgcctccgactacgccggcctgatccagggcatgcgcttcaacaaggtcgacgtggcctggctcggcaacaaggccgcgatggaagcggtggaccgttccaacggcgagatcttcgcccagaccgccgccgccaacggtgccgccggttactggagcgtgttgatcgtgcgcaaagacagcccgatcaacaacgtcgacgacatgctcaagaacgccaagaacctgaccttcggcaacggtgacccgaactccacctcgggctacctggtgccgggctactacgtgttcgccaagaacaacgtggatgccgccaccgcgttcaaacgcacgctcaactccagccatgaagtcaacgcgttgagtgtggccaaggggcaactggacgtcgccaccttcaataccgagagctgggagcgcctggaagtcacccaaccggacaaggccgccatgctcaaggtgatctggaaatcgccgctgatccccgccgacccgatggtgtggagcaaggcgctgagcgacagcgagaaggccaagattcgcgacttcttcgcccactacggcgacaccgatgaagagaaggcggtgctgaagaatatgcagttgggcaagttcctgccgtccagcgatgaccagctgttgccgatccgccagttggagctgttcaagcagcgcaccaccgtcagtgccgacgacaagctggaggctgccgacaaggccaagaagctggcggatatcgacgccgacctggccaagctgcaacagcgcatctccgagctcgacaagaaaaccgcagccaacggttaacccctgtgggagggggcaagccccctcccacatttcgctcgaggacaaccatgactactttgcacgctgaagccgtcggcaaacgcacctggccgcaatacctcggctggggcctgttcctggtcctgctggcctgggcctggcacggcgcggaaatgaacccgctggcgctgtaccgcgactccggaaacatggcgaccttcgccgccgacttcttcccgccggacttccacgaatggcgcagttacctcaaggagatgatcgtcaccgtgcagatcgccctgtggggcacggtattggccatcgtctgctcggtgccgctgggcatcttgtgcgccgacaacatcaccccgtggtgggtgcaccaaccgctgcgtcgggtgatggatgcgttccgttcgatcaacgaaatggtgttcgccatgttgttcgtggttgccgtcggcctcggccccttcgccggcgtactggcgctgtggatcagcaccaccggtgtactcgccaagctgttcgccgaagccgtcgaagccatcgacccaggtccggtagagggcgtgcgggccactggtgccagtgccctgcaggaagtgatctacggcgtgatcccccaggtcatgccgctgtgggtcagctacgcgctgtaccgcttcgaagccaacgtgcgttcggcgacggtggtgggcatggtcggcgcgggcgggatcggcgtgatcctgtgggaaaacatccgtgccttccagttcgtccagacctgcgcggtgctgctggtgatcatcgtggtggtgagcctgatcgacgtgctgtcccaacgcctgcgcaagcagttcatctgacctcggaggagtgcccgcgcggcgctttttttaagcatgcagttgtctagacaagatgagccggtgtaccgcgaactcgcggatatcctgcgccgtgaattgagcagctacagcgccggtgatttcctgcccggtgaggtgcacatggccgagcgcttcggcgtcaaccgccacaccctgcgtcgcgccatcgatgagctggtgttcgaaggcagcctgttgcgtcgccagggcaagggcacccaggtgctcgaccggccgctgatctacccgatgggcgccgagacctcctacagtcaatccctgtcagcccagggcgtcggtgtgcaggcggtgttgctcaagcgccgctactgctacgccagccgtgaagaagcgctgcacctggggatcgccgaaatggcgccgatgatcgagctgcaaaccctgcgcaagctcgaccagcagcccgtcagcctgatccgccatcgctactgtgccagccgtgcgccgttgctggccgactacaccggcggttcgctgcgccagtacctgcgcgaacgcgacctgccattgactcgcacccacagccttatcggtgcgcgcctgcccaaccgtgacgaagccgcgctgctgatgatgcctcggcacttgccggccctcaccgtattcaccctttcccgcgatcgcgacggccacccggtggagctggcgcagtccaccagccgttcggatcgcttccagtaccaagtggtgacttgatggagaccctgatgaacctgtccccgcgtcagcattggattggtgtgctcgcccgcgcccaactcagtgaattgcaaccccacgaagcggccttgaaagacgcggagtaccagctcattcgcgccccggaaatcggcatgaccctggtacgcggtcgcatgggcggcaatggcgcaccgttcaacgtcggtgaaatgagcgtgacccgctgcgtagtgcgcctggccgatggccgcaccggctacagctacctggccgggcgcgacaaggtgcatgccgagctggccgccctggccgatgcccatttgcaaggcgcgcagccgagtatctggctcagcgatctgatcactgccctggcgaacgcccaggtcaggcgtcgcgctgaaaaagaggcggacaccgccgccaccaaggtcgagttcttcaccctcgtgcgaggagaaaactgatgaatgcgcaactgttgcaaccggcgtttgtcgacccggtattggacgcccagcgtggttttcgcgccgcgctcaaggccctggccgaaccggggttgatccagcacctgccatccgccccacacctcgagggcctggcgccggcgacgtacgcgttgtgcctggcactgctggacgtggacacgccgctgtggctttcaccgagcttcgacacgccgctgatccgcgccaacctggcgttccactgcggttgcccgctgacttcgcatcgcgaagcagcggtgttcgccttgctcggtgaacacgacctgctggatctgagcggcttcgaccacggcaacgaccgctaccccgaccagtcctgcaccttgctcgtgcagctcaccgacctggagtccggtcgcggcctgctctggcgcggcccaggcatcaagacccagcgccaggtgcacgtcccggtgccgcaggccttctggcaggaacgccaacggcgcaaaacctttccccgtggcctggacgtgctgtttgccgccggccatcacctgatcggcctgcctcgcagcagccgcattgcacaggagcatgcctgatgtacgtagccgtcaaaggtggcgaacaggccatcgacaatgcccaccgcctgctggcgaaaaaacgccggggcgataccgcgattccggaactgagcgtgacgcaaatccgcgagcaactgcccctggccgtggcgcgggtgatgaccgaaggctcactgttcgacgaagaactcgccgcgctggcgatcaagcaagcggcgggggacctggtggaagcgatcttcctgttgcgcgcctaccgcaccacgctgccgcgcttcagcccgagcctgccgatcgataccgcccggatgtcgttgagccggcgactgtcggccaccttcaaggacctgcccggcggccaactgctcggcccgaccttcgactacacccaccgcctgctggattttgccctgctggccgaaggtgagtacccggggccgcagaccgcgccggaggcgacgctggaagactgcccacgcgtgctcggcctgctcgccaaagaaggcctgatcaagaccgaaaccgacgacaacgcccgcgttgccgacatcacccgcgacccgctggaatacccggccagccgcgccgagcgcctgcaagccctggcccgtggcgacgaaggtttcctgctggcgctggggtactcgacccaacgtggctacggtcgcaaccacccgtttgccggtgagattcgtatcggcgatgtggaggtgtggatcgaaccggaagaactgggtttccccatctgcctgggcagcatcgaagtgaccgagtgcgagatggtcaaccagtttgtcggttcggctaccgagctggcgcagttcacgcggggttacggcctggccttcgggcatgccgagcgcaaggccatgggcatggccctggtggaccgctcgctgcgcgccgaggagtacaacgaagagatcgtctcgcccgcccagcgcgaagagtttgtgctggcccactgcgacaacgtcgaggcggcgggctttgtctcccacctcaaactgccgcactacgtggactttcagtccgagctggaactgatccgcaaactgcgccaaccggccgagggcccgagccatgaatgacgccgcgtacaacttcgcctacctcgacgaacagaccaagcgcatgatccgtcgcgccttgctcaaggcggtggcgatccctggctaccaggtgccgttcggtggccgcgagatgccgctgccttacggctggggcaccggcggcatgcaattgaccgccgcgatcctgggggacgatgacgtgctcaaggtcatcgaccagggcgccgacgacaccaccaacgcggtgtcgatccgccgcttttttgcgcgcactgcaggcgtggtcactaccgaagcgacccctgaagcgacggtgatccagacccgtcaccgcatcccggaaacgcccttgcaggcgaaccagatcatggtgttccaggtgccgatctcagagccgctgcgttttatcgaaccctcggaaaccgagactcgcaccatgcacgccctgaatgattacggggtgatgcatgtgaagctgtatgaggacatcgccaccttcggccacatcgccacggcctacgcctacccggtgacggtggatgaacgctacgtgatggacccgtcgccgatccccaaattcgacaaccccaaactcgacatgagcccggcgctgatgctgttcggcgccggtcgcgagaagcgcctgtatgcggtgccgccatacacccaggtcaccagcctcgactttgaggaccacccgttcgaagtgcagaaatgggcgcacagctgcgcgatctgcggcagccatgaatcgttccttgatgagctgattctggatgacgccggaacccagagttttgtgtgttccgacacgtggtattgcgcccagcgggtgaaggagaacaaccagtgagccagccgttattgcaagtgcgtgacctgtccctgttgtacggcccggagaagggttgccagggtgtgagcttcgatctgtaccccggcgaagtgcttgggattgtcggtgagtccggttcgggtaaatccaccttgctttcgttgttgagcgggcgcctgccgccgcacgcgggcagcatcggctaccgcagccaggacggcgaatggctcgacctctacagtgccagcgaagccgagcgccgcaccttgctgcgcaccgaatggggctttgtcgagcagaacccgcgtgacggcctgcgcatgggcgtgtcggccggcgccaacattggtgaacgcttgatggcccagggcgtgcgcaattacgcgcaactgcgtggcgccggtctggactggctggagcaggtggagattgacccacaacgcatcgacgacctgccacgcaccttttccggcggcatgcagcagcgcctgcaaattgcccgcaacctggtttccagcccacggctggtgttcatggacgaacccaccggcggcctcgacgtgtcggtgcaagcgcgtctgctcgacctgctgcgcggcctggtgcgtgaactggatttggcggtggtgatcgtcacccacgacctggccgtggcacgcctgttggccgaccgcctgatggtgatgcgtcgctctcgtgtagtggaaaccgggcttaccgaccagatcctcgacgatccacagcacccttactctcaactgctggtgtcttcggtattgcagccatgacaaatgccttgatcgaggtccgtgacctctcgaaaaccttcaccctgcaccagcaaaacggtgtagtactcaatgtgctgcgcggggtggagttcagtgtgcagggcggcgaatgcctggtgctgcacggtcagtccggcgcgggcaaaagcaccttgctgcgtacgctgtacggtaactatctaccggccggtggcagcattcgtgtacgccatgccggcgagtggctggagctggtgggcgccgcgccccgcgagattctgcaggtgcgccagcagaccctgggctacgtcagccaattcctgcgggtgattccgcgtgtggcgtgcctggatgtggtgatggagccggcgttggcccgaggctggtcgaaagccgaggcacaacagcgcgccgaacacctgctgacccgtctgaacatcccccagcgcctgtggccactggcgcccggtactttttccggtggcgagcaacagcgcgtcaacatcgcccgcggtttcatggtggcctggccggtgatgctgctggacgaacccaccgcctccctggacgaccacaaccgccaggtggtgctggaactgatgaacgaagccaaggctgccggcgctgcattgatcggcatcttccacgaccgtgccgcccgtgaagcggtggccgatcgccatttcgacatgacccccacgcctgttgcccaagaggaatacgcccatgcccgctgaacagatcctcagtaatgcccaggtcgtcacggctgatcgcatgttcctgggctcggtggtgttgcgtgatggcaagatcgtcgacctcgccgaaggccgcagccagttgccccaggcccaggacctgggcggtgatttcctgctgccgggcctggtggagttgcacaccgacaacctggaaaaacacatgaccccgcgccccggcgtggactggccgtcgacctcggcagtgctcagccacgatgcgcagattatcgcggcgggcatcaccaccgtcttcgatgcggtgtccatcggcgacgtgaaccccaagggcaaccgcatgaaaaaactgccggcgatgcttgatgccattgcccaggcagaaggtgctggcctgacccgcgccgagcaccacctgcacctgcgctgcgagctgtgccacccggacaccctcagtgtgttccgcgacctggtggaaaacccgctggtgcaactggtgtcggtgatggaccattcgccgggccagcgccagtttgtgcttgaagccaagtaccgtgagtactacatgggcaagtaccacctgaacgacgaaaccatggacgccttcatcgtgctgcaaaaggccaactccctggcctacagcgaccgctaccgtgcggctatcgtcgagcattgcctggcgcgtggtttgtcggtggccagtcacgacgacgcgacgctcgcgcatgtgcaggagtcggcacgctatggcatgaccatcgctgaattccccacgacgctcgaggcggcgaagggctgccaggcgttgaacatgaaagtgttgatgggcgcgccgaacgtggtgcgcggcgggtcgcactcgggtaatgtggccgccgccggcctggcggccgagggcttgctggatatactttccagtgactactacccggccagcctgttgcaggcggccttcgtgctggctgaccagcaagacggcggcgacctgtcgcgggcggtcaagatgatcagcctggcgcccgcgcaggcggcagggctgaaggaccgtggcgagattgccctcggcctgcgcgccgacctggtccaggcccgcaaccgcgaagggctgcctgtggtgcaacaagtatggcgacaagcgaagagggtgttttgatggcaggcaggttgatctatctcatcgggccgtccggctcgggcaaggacagcctgctggatgccgcacgcccacgcttggccgagcgcggttgccgcattgtgcgccgtgttatcacccgctcggcggaagcggtgggcgaagcggcgcagggcgtcagccccgagcaatttgcgacgatgcaggccgagggcgcgtttgccctcagttggcaggccaatggtttgttctatggcattcccagggagatcgacgattggctggcggcgggggacgacgtactggtcaatggctcccgtgcgcacctggcgcagactcgcaagcgttatccgacctcgctggtgttgctgctgacggtggaccaggcggtgttgcgccaacgcctgatcgcacgggggcgtgaagcgttggcggatatcgaggcgcgcctggcgcgcaatgcgcggttcaccgccgagctgatcgccggcaacggtgcggggttgttcgtactggataactccgggccgctggaacatacggtcgagcgcctgctgtgctgcatcgatcacgggcactcggcatgcgcctgaccttgctcggcaccggtgacgcgcggcaagtcccggtgtatggctgtgagtgcgccgcgtgcggtctggcgcgcagtgatgccagcctgcgccgtcgcccgtgcagcgcgttgatcgaatgcggcgaccagcgctggttgatcgacagcggtttgcccgaccttaccgaacgcttcccaccgcgcagtttcaacgggatcttgcagacccactatcatgccgatcatgcccagggtctgttgcacctgcgctgggggcaagggctggtgattccggtgcacgggccggtggatgccgaaggtttgtccgatctgtacaaacatccgggcatcctggatttcagccagccattcagcgaatttgaaacccggcagtttggcgaactgagcgtcaccgcgttgccgttgcagcattccaaaccaaccctgggttacctgctggaaggcgaggggcgacgcatcgcctacctcaccgacaccgtcggcctgccgcctgcgaccctggcctggctgcaacgcgaacccctggatgtactggtgctggactgttccatgccgccgcagccgcaggcaccgcgcaatcacaatgacctgacgctggcgttgcagagcatcgagcaaaccggtgcgcagttgggcgtgctgacccatgtcgggcacacattggatgcctggctgctggagcatcgccgcgagttgccacggcaagtcacggtcggctgggatggccgggtcatctgaacgccaaaggttccacagaaccctacttcgtcagtaacccttcaacgtattcgataaatgccttggctttggcacttggcattcgacccgtcggcaataccgcccacaggtccttgggcggcagttcccaatcggtcaacacggctttcacctcacccctggccaattctggtgagaacatccactcggacgtcatcgccaggccatggtgggcgagcacgcctgcgcgcaagccttcggaagaggtaacacgcaagcgtcctcgagcggcgatggcgtgttcgtgcgggccttgtttgaatgaccagagcgggctttccccgaggctgtagatcaccgcctggtggttgaggatatccgccgggctttgcggttcgccgaaacgttcgaagtaggccggtgtaccaaacacccggcttgggctttggccaagccggcgggcagtgaggccggagtcactcaggttgccgatgcgcagggcgacgtcgatgccgtcttcaaccaggttgaggaggcggtcgtcgagcaacacgtcgatgttcaggccagggtgttggtccaggaacggtcccaggttaggaatgatccgcatacgggagaacgtcacgccggcgctgacccgcaggttgcccgtcaagccagcgcctgcgccacgggcggcctcgtcagcttcatcggcttcgaaaatggcgctcttggctttctcgaaaaatgccaggcctgcctcggtgggggtcaggcccctggtcgagcgcagcagcaatcgcacggccaggcgggcttccaattgcgcgatgcttttggaaacggcgggttggccgatgcccaggcgtttggcagcggcggagaaggagccggtctcgacgacgtgaacgaaggtttccatggcagtgagacggtccatcgggcgttcctgttagctgggcggcgctcaagcctaaggcgctggactagcggtgtcatgcgtttcccgtgttgcgccggtgagttttcaatattcggtaaaacagccgtcagtcaggcatgcgcattttgtgcttgagtaaagataactctagggttacttttattcaggccaagccaaggaggcgagggtgcaaagcaggctattgatcaaggaactgcaagaggcgggttgggtattggatcgggtcacgggcagccatcacatttttacccatcgttacagcccgtacacgattcccgtgcctcatcctaaaaaagacttgccgttgggcactgtcagaagcatcaggaaacgcgccgggctatttgatttttaaggagagcattcatgcaatacccaatctgtatcgaatggggcgatgacttcaccgccaccggtatccagatccccgatattccaggcgcagtcaccgccggggacagctttgaagaggcctacaacgccgccgtggaagtcgcgcacatcatgctgcaagagatcgccgcagagggcggggccattccgatgccaacgtcggtcgcccattatcatgcccatgaggactacgccgggatgggctggggcatgttggagttggacgtcacgccctacctgggtaaaaccgagaaggtcaatgtgaccttgcccggttatgtcatccagcgcatcgaccggtatgtacgggagcataaggtcaaaagccgctcgtcattcctcgcggacgcggcgttggaaaaattggtgcggtcctagggcgatcaggcggtgtcaggtgtcggtcgcgtacgttgtcggatgagcacggttttttttgcgcatctttttccgggcatgtttgagtcagtttccttatgtttgaaattaagattttgattgaaataagggagtgtttgacaagtttttttcctctagaaatcaacttagtagtgttgttgatatgtcaggagagttgggccgatcagtgattgagtgtgttttctttgcaggtgtgtttattaagtgtttttgaaaagaaccagcactggcgaacgtgtcattgatttgagaattttagcgtcctgccaatggactggtcagcgttagtatttttcatccatggacgaatggctcttcactgttcagagtattcatcgtcatgcactttcctgtcaggcaaccttcacagcaaccccctgcgcttgcgccgaattcccttttgtcagcgtttgataacgacgccttgcactggggaaacaataagaagtcgttcagtaccgcgcaggcggctaaacatatcactcgaggtaacttcaagtttcatgatcgggacggggataataaggtcgtggtgggcttcagtttttccggcgtctttacctcggcccagaaagagcgcgccaggcaggcattgaaagcctatgccgatgtcgccaacatttcctttgtcgaaaacagcgctcatacggatggcggcatagtcatcaggggcgtgccgggttcctggtcaggctgggcggcctctcccagtcagtaccagccgaacgtaacggcgaatgtggggacgggaggcgcaggcgccaaccctgaaatgggcagtcatttcttgtctttgttggtccatgagttggggcacaccttgggcctggaacatccgggcggttacgacggcggtgggacttacgaggccaatgccgattatgcgcaggacaccaaggcccgcagtgtcatgagctattggtcggaacgcaaacaaccggggcatgacttcaacgaacagcaacccgctgcccccatgatggacgatatcgccgcgctccagcgcttgtacggagcgaatacgcgcacccgtgccaccgacaccgtctatgggttcaactccaacaccgagcgtgagcactacagcctcaggagcgcccgcgacaagcccgtgttcagcgtctgggatggcggtggcgaggacaccctggatttctccggctttaccgataaacaaaacatcaacctcaatgccgaggcgttttcggatgtgggcgggctgcgggggaatgtgtcgatcgccaagggggtgagcgtggagaacgccattggcggttccaacagcgatgtgttgacgggtaacggcgccaataaccgcttgaaaggggctggcggcagcgacacgttgcgcggcggtgccggcgccgacacattcgtgtacgcccgcgtcagcgactcaacaccccaggctcccgattttattcaggacttcaccagcggtagcgacaaaatcgatgtggctggcgtgctgcgcgaggccgggctcacgtcgctgaacttcatggatagcttcagcgggcgtgccggcgacgcggtgctcagtcatgacaccacaaccgggcgctccacactggccgtggataccacgggcaacggcacggctgacctgctgatcagcagccatggtcaaatcaaacaggaggatgtgatctggagtggtaatggggagcccgcagccgtgacgcccgatcagacggctgatctcacgctggagccggacccggatcctgcgcctgactcaacgtcacagccggatccgagtacgacgcctgggcctgcgtcttggtttggtgagcgggtgggcaaacagatagcttcaggtatctcgcttttcgcgaactggatatccgggtggttcaggtgagttcaaggtttatccaataagcccaccgaatcctcacgggaaacactcagaaagcgcagcaatgccaccaacgggaatgcactacccaccagcatcacacccagccagccgccgtgttcatacacgctgctggcaatcgccgagccgaatgcgccgccgatgaagatgctggtcatgtacagcgcgttcaggcggctgcggctgttggcgtcgagggcgtagatcgcgcgctggccgagcaccatgttcatctgcacgcagaagtccaggaccacgccggtcacggccaggccgatcacgctgtacagcgggtgcacgaaggccggcaggaagctcaacgcggcgaacaacatggccagcagcgaagcgcgatgggtgtgaccggcatcggccaggcgaccggcgatgggtgcggcaatggcacccagcgcaccgaccagggcgaacagggcgatctcgctttggctcaggccgtggttgcgcgccagttccagtggggcagcggtccagaacaggctgaaggtggcgaacatgcagccctggtagaacgcccgttgacgcagcaccggttgctgacgcagcaaggtgccgagggagcgcagcagttggccatagctggcagagtgatccggctgacgcttgggaatggtcagaatcaacaccacactgataaacgccatcagcgccgccgccgccatgaacatcgcacgccagccgaagtggtccgcgaccacgctggacaccggccgcgccagcaggatgccgagcagcaggccacccatgatgctgccgaccacacggccccgtgattcggcgggcgccaagtgcgcggccaacggaatcaggatctgcaccgacaccgaactgaagccgatcagcagcgacaccagcaggaacaggttcggctgctcggtgaccgctgcgcccagcaggctggcgatagcgatgacggtggtggcgatcatcagtttgcggttttccagcaagtcgcccaggggcaccaggaaaaacagccccagggcgtagccgatttgcgtcagcgagacgatcaggctggccatggccggcgtgaggccgatgtccggcgcgatcagctcgatgatgggttgcgcgtagtagatgttggcaacgatggcgccgcagcaaaacgcaaacagcatcaccatgctccgggtcatggtgcttgtagcgtgggaagtagcgttcatggtgttctcataaaagcgaaggaagtggggcgagcctaaagacaacaccgtagcccgggtaggccgctggcagtgataacactcatgcccggtaatgatgagtgaatcgttaactttctgcgcgaacgctgatgatacattcaggcaccactgccgaaacaggaaatccattgcaatgaagatcacgttgaacaagatgctcctggcttccacgctcgccgccgccatggccgtgggcctggcccaggctgccgagacgcctcgcgtgggcgtacgcggcgccattacggcgatggacggggacgcgatgcatgtcaaggtcaacagcggcgaagaagttgtcgtgcacttgacccaagacacccaggtgcgcgcggtcaccctggccaaaatcgatgaaatcaagccgggcagctacatcggctcggccgccatgcccaacgacgacggcagcctgacggcgctggaggtgcacgtgttccccccggcgatggccggcacgggcgatgggcatcgtgcgtttgatttgaaagaaggcagcagcatgaccaacggcaccgtcggcgacctggtggtgagcaacgggcgcacgctgacggtgaaatacaaaggtggcgagcagaagatcgtggtgccggaagatgtgccgatcgtgaacctggagccgggtgaccgcagcttactcaagccgggggtgaaggtggtgctgtttgccgcgcagggggcggatgggacgatcactgcccaagcgatctccgccggcaaggatggcgtgacaccgccgatgtaacggccaaatacagagccaaatgtgggagggggcttgcccccgatagcagtgtgtcagccagcggataaaccggctgatacaccgccatcgggggcaagccccctcccacatttatcaattactggccgctgtagatctggtcgaacaccccaccatcgttgaagtgggtcttctgcacggtgcgccagtcaccaaaggtcttctctaccgacaggaagtcgactttcgggaagcggtcggtgtacttggccaatactgccggatcacgtgggcgcaggtagttgttggcggcgatttcctggccttgcggtgaccacaggtacttcaggtagtcttcggcggccacgcgggtgcctttcttctcgaccactttgtcgaccaccgacaccggcggctcggcttcggcggaaacgctcgggtagatcacttcgaactgatcacggccgaattcacgggcgatcatctcggcttcgttctcgaaggtcaccagcacgtcgccgatctggttggtcatgaaggtggtggtggcggcacggccaccggtgtccagtaccggggcttgtttgaacagcttgccaacaaaggccttggccttgttttcatcaccgccgttcttcagcacatagccccaggccgacaggtaggtgtagcggccgttacccgaggttttcgggttgggcacgatcacctgcacgccatctttcaacaggtccggccagtctttcagggctttcgggttgcctttgcgcacgatgaaaacggtggccgaggtgaacggcgcgctgttgttcggcaggcgggtgacccagttgtccggcaccagtttgccgttgtccaccagggcgttgatgtcggtggccatgttcatggtgatcacgtcggcgggcaggccgtcgatgaccgaacgcgcttgcttgctcgagccaccgaaggacatctgcagggtcagcttgtcgttcgggtgctcggcttcccagtgtttctggaacgcggcgttgtagtccttgtagaagtcgcgcatcacgtcgtaggagacgttgagcagtgtcacgggggcagcctggacggcgcccgccagggcaaggccggcggccagaagggaggcgctaacgagttttttcactgctcattccttgttgttcgagaaggttgctgattgagtgggggcaatttgccagcgactatagctggcgtcgcatagacgcttaaagattaaaacgaactttgcttattccactttcttgaaaagattactgccacagcgtgagcagaatgcagcgttcggctcatgactgtctttcttgcacaccgggcagtcatgctgcaattgctcaccgcgcatggcactggccagttcggcggtgaaaataccggtgggcacggcgatgatcgaataaccggtgatcatcaccagggacgaaatcacctggcccagcggggtcttgggcacgatatcgccaaagcccaccgtcgtcagggtcacgatggcccagtagatgcccttgggaatactggtaaacccgtgctccgggccttcgatcacatacatcaaggtgccgaacaccgtgaccagggtgcatacgctcaccaggaacaccacgatcttctgcttgctgccgcgcagcgccgccatcaggtaattggcttgcttgaggtaggggctgagcttgagcacgcggaaaatccgcagcatacggatgatgcggatgatcagcaggtactgtgcatcgctgtagtacagcgcgaggataccgggcacgatggcgagcagatccaccaacccataaaagctgaaggcgtagcgcaagggtttgggcgaacagtacagacgcagcccgtactcaatcaggaagataagggtgaacccccactcgatatacgccagcacgtcagcgtagttctggtggatctggtcgatgctgtcgagcatcacgatcaccaggctggcgaggatgatcagcagcaggatgccgtcaaagcgccgcccggcgaccgtgtcactttgaaaaaccatgacgtagagccgctggcgccagtcgttgttgctgtccataaagcccgcctgaatcgaatatcgagcaagcctagggggattcgaaggggctgtccatgcggggtttctgcagcactcgagtaccggcgcgcaccagccagcaggcgaggatgaacggcgcggtcaacgcgggcaggtgcacagcggcaaagcctggggtgaggaggatcgccagcaggatgccgagcagcggcagccagggttggcgacgcacctggctcaatgccacagccgccaacgccgggttgtagctgtgcaggccgaggagggcactggcgggttcgtccagccacagtgcgagcagcacgccgacactggcgcctatcaacgcccatatggcggcgcggcggttggccagccacaggcccagtgcaatcagcgcacccgccaccggttgatccagcagcatgacctgcgcgagcccggtaaaaggcgcggtgaggatagccaaggtgtcgggttcgctcagggcaaacgtgttctgcggcaccgtgcccagcaacaaccagcccaggccgacaaaaggcacggtgtaagcgggcaagtcattgggctggtcggcgtgtttcaaccattgccgtgtcaacatcgccgccagtccgccgcacgcaaggatcagcggcggcagcaacgccgaccaggcgaagtgctggctgatcaataagcccagcagcacgccgttgtagctgtaaaggccggcctggcgttcggccttgggataaccgcgacgctgggccgtgagcaaccccgccacgccacccagcaatgctccgccgaacaaggccggggcgccgatcaggattgccagcagacacagcaggccgcacagcggctggcgctgcaggaagatctggctgaagccgttgagcagcgcttcggcccagtcggggcaggttgggttgtgcatggtggttagtcagtgggaccgagtcgttcccatcggaggcaagccccctcccacatttgaatctgtgaacccaatcaagtgtgggaggggcggtgcgacgattcgacttgcccccgatgaggcccttacagacgctaaatcaacgtctcgatacgcagcgagttggtcgaccccggctgcccgaacggcactcccgcggtaatcaccaacgtatccccgcgctcagccatgccctgtgcctgggcgatctccagcgccgtggaacacacctcgtctacctggcgcaggcggtcattgaccaccgaatgtacgccccatgccacgctcaagcgccgtgccgtggacaggttcggcgtgaggttgaggatcggcgccaccggccgctccctggccgcgcgcaggctggaactgcccgactcgctgtagttcaccagcaccgctaccggcaggatgctgctgatgcggcggatcgcgcagctgatggcgtccgacaccgtggcgtccgccttgggtcggttgacgtcgagctgggtctggtaatccgggccgttttccacctggcggatgatcttgctcatcatctgcacggcttccagcgggtactcgccggacgcggtttccgccgacagcatcaccgcgtccgcgccttcggccacggcgttggcgacatcggtgacttcggcacgggtcggcgccggcgagaagcgcatcgactccagcatctgcgtggccaccaccaccggtttacccagttggcgacagatgcggatgatgtctttctgaatctgcggcacgctttcggccggcacctctacgcccaggtcgcctctggccaccatgattgcatcgctcagttcagcgatttcccgcaggcgctgcacggccgagggcttctcgatcttggccaacaggaaggccttgtcgccgatcagttcgcgggcttcgcggatgtcttccgggcgctgtacgaacgacagcgccacccagtccacgcccagttccaggccgaagctcaggtcgcgccgatccttggcggtcaacgggctgagttccaacaaggcttgtgggacgttcacgcctttgcggtccgataattcgccgccattgagcacggtggtgtcgatggcgtcagcatgcttggtgatgacccgcaggcgcagcttgccgtcgtccagcagcaggtccatgcccggttccagcgccgcaatgatttccgggtggggcaggttgacccggcgctggtcgcccggcgtcgggtccaggtccaggcgcagggcctggccgcgcaccagttgcaccttgccctcggcaaagcgcccaacgcgcagcttcggcccttgcaggtccatgaggatgcccaacgggtagttcagttggcgctccacctggcggatccactggtagcgctgggcatggtcggcatgatcgccgtggctgaaattgagccggaagatattcaccccggcttccaccagttcgcggatgtcgtcgataccatcggtggccgggcccagggtggcgagaattttgaccttcttgtcaggcgtcatggtgggcagtctcaaggatcaggatggcgcggaagtcgttgacgttggtgcgtgtcggctcggtgacgatcaacccgtcgagggcagcgaaatagccgtagccgttgttgttatccagctcatcgctggccgacaggccgagggcttcggcgcggcggtagctgcacggggtcatgagggcgccggcgttgtcttccgagccgtcgatgccgtcggtgtcaccggccagggcgtacacgccgggcaggcccttgaggctgtcggtgaggctcagcaggaactccgcgttacgcccgccacggccattgccacgcacggtgacggtggtttcgccaccggacaggatcacgcacggcgccgccagcggctggccgtgttgcacgatctgccgggcgatgccggcgtgcaccttggccacgtcccgcgcttcgccttccaggtcgccgaggatcaacgggctgaacccggcctggcggactttgaccgccacggcttcgagcgattgctgcgggcgggcgaccaattggaagtggctgcgcgagagcaccgggtcgccgggcttgacggtttccgaggccgggtccagcaaccaattgcgtactgaggcgggggcgtcgatgtggtagcgcttgaggatcgccatggcctgttgcgaggtgctcgggtcgccgaccgtgggcccggaggcaatcaccgtggcctggtcgcccggcacatcggaaatcgcataggtgtagaccgtcgccggccatgccgctttcgccaggcggccgcccttgatcgccgagaggtgcttgcgcacgcaattcatctcaccgatggtcgcgccggatttgagcagggctttgttgatggcctgtttgtcggccagggtgatgccctctgcgggtagggccagcagggcggagccgccgcccgaaagcaggaaaatcacgcggtcgtcttcgccgaggttgctgatcagtgccagcacccgctgggccacagccaggccggcagcgtcgggcaccgggtgggcggcttcgaccacttcgattttcttgcacggcgcgccgtggccgtagcgggtgaccaccaggccgctgacttcgccttgccagcagttctccacgaccagtgccatggcggcagccgctttgccggcaccgatcacgatcacacggccgctgcggtcggcgggcagaaagggttcaaggacttgccgggggtgtgcggcgtcgatggctgtggcaaacagctcgcgaagcaggtgttgcggatcgaccgacataagcgggctcccggggatttttgttattagaggtgcgtcaatttcaggcttggaatggggtcaaattgtgggagggggcttgcctcctcccacatttgattgcatttcatcaggggttatttatcgcgaatcgagaagttcgccatatgctccaggcccttgatcagcgccgaatggtcccagttgccgccgccaatcgcggtgcaggtgctgaacacttgctgggtgccggcggtgttcggcaggttgatgcccagctccttggccccggccagtgccaggttgaggtccttctggtgcaggttgatgcgaaagcccggatcaaaggtgcccttgatcatacgttcgccatgcacttcgaggatcttcgacgaggcaaaaccgcccatcagcgcttcacgcaccttggccgggtcggcgccgttcttggaggcgaacagcagggcttcggccaccgcctggatattcagcgcgacgatgatctggttggccaccttggcggtctggccgtcgccattgccgcccaccaacgtgatgttcttgcccatggcctggaacagcggcaaggcgcgctcaaaggtctgcggctcgccaccgatcatgatgctcagggtgccggccttggcgccgacttcaccaccggacacgggcgcgtccaggtactgcgcgccggtttcgttgatcttcgcggcaaacgccttggtggcggtgggggagatcgagctcatgtcgatcaccaccttgtttggcgacaggcccgcagccacgccgtctttgcggaacagcacgtcgtcgacctgtggggtgtccggcaccatcacgatgatgaactcggcttcctgcgccacctgctgcgggttcgccagggcgacggcgcctgcgtcgatcagggcttgcggcgccttgccatggtgttcggagaggaacagttggtgacccgctttctgcaggttcgcggccatgggttggcccatgatgccggtgccgatgaatccgattttagccatgaaaaaatcctcttgttattacaccgcaagtccactgtgggagggggcttgcccccgatgacggtgtgtcagataaacagtgctgacagacccaccgcgatcgggggcaagccccctcccacatggagtttgcgtggtgtttgttagatcgcgttgtgggtcttcaaccaacccaaacccgcttcggtggtggtcaagggcttgtattcacagccgacccagcccgtgtagccgatgcggtccaaatgttcgaacaggaagcggtagttgatctcaccggtgcctggctcgttgcgccctgggttgtccgccaactggatgtggttgatctggcccaggtgcgcagccatggtgcgggccaggtcgccttccatgatttgcatgtggtagatgtcgtactgcagaaacaggttgtcactgcccacctgttcgcgaatcgacagggcctgcgccgtgttgttcaggtagaagcctgggatgtcgcgggtattgatcgcttccatcactagcttgatgcccaccgcttgcagcttttcagcggcgtacttgaggttggcgacgaaggttttttccagggtctcgtcatcaacgccttgtggccggatgcccgccaggcagttgatctgggtgttgcccagcacttgggcgtaggcgatggccagcttgaccccggcacggaattcctcgacccggtccgggtggcacgccaggccgcgttcgcctttggcccagtcaccggccggcaggttgaacagcacctgggtcaggccgtgcgcatcgagttgtgccttgatttcagccgagctgaattcgtaagggaacaggtactcgaccccttggaacccggcatcggcggcggctttgaaccgggcaagaaagtcctgttcggtaaacagcatggacaggttggcggcgaaacgcggcatagggttctccttaatcgagcagggaaatggcggtcggcgcatcgttgccgaccagggccagatcttcgaattcattgacggcgttgatctcggtgcccatggaaatattggtcacgcgctccagaataatctcaacgatcaccggcaccttgaattcttcgatcattgcctcggcacggcgcagggccggcgcgatctggcctggctcgaacacacgcagggccttgcaacccaggccttcggcgacggccacgtggtccacgccgtaaccgttgagttccggcgcgttgaggttgtcgaaggacaactgcacgcagtagtccatttcaaacccgcgctgggcctggcggatcaagcccaggtaagagttgttcaccaccacgtggatatacggcagcttgaactgcgcgcccacggccagctcttcgatcatgaactggaagtcgtagtcgccggacagcgccaccaccttgcggctcgggtcggccttgaccacgccgagggcggcggggatggtccaacccaatgggccggcctggccgcagttgatccagtggcgtggtttgtacacgtgcaggaactgcgcaccggcaatctgcgacaggccgatggtgctgacgtagcaggtgtctttgccgaacacctggttcatctcttcataaacacgctgtggcttgaccggcacgttgtcgaagtgggtcttgcggtgcagggtggccttgcgctgctggcagtcgtgcagccaggcactgcgatccttgagtttgccggcagctttccactcgcgggccacttcaatgaacatcgtcagggcggagccggcgtcggaaacgatgcccaggtccggggtgaacacgcggccaatctgcgtcggctcgatgtcgacgtgaatgaatttgcgaccctcggtgtacacctccaccgaaccggtgtgacggttggcccagcggttaccgatgcccagcaccacgtccgacttgagcatcgtcgcgttgccatagcggtgggaggtttgcaggccgaccatgccgaccatctgcgggtgatcgtccgggatggtgccccagcccatcagtgtcgggatgactgggatgccggtcaactcagcgaattccaccagcagctcgctggcgtcggcattgatcacgccgccgccactcaccagcagcgggcgctcggcctggtccagcagggccagggctttttccacctgcacgcgggtggccaaaggcttggccaggggcagcggctggtaggcgtcgatgtcgaattcgatctcggccatctgcacgtcgaacggcaggtcgatcagcaccgggccggggcggccggagcgcatttcatagaaagctttctggaaggcatacggcacttggccgggctccaggacagtggtcgcccacttggtcaccggcttgacgatgctggtgatgtccacggcctggaaatcttccttgtgcatgcgggcgcggggcgcttggccggtgatgcacaggatcgggatcgagtccgccgaggcgctgtacaggccggtgaccatgtcggtgcccgccgggcccgacgtgccgatgcacacgccgatattgccggccttggtgcgggtgtagccctcggccatgtgggaggcgccttcaacgtggcgagcaaggacgtgatcgatgccacccaccttctgcaaggccgaatacagcgggttgatcgcggcgcctgggataccgaaggcggtgtctacgccttcacggcgcatgacgaggacggcggcttcgattgctctcattttgctcatgattttggtgcctcttgcgttttgtaattgtatacaagtggtgtctgtccaaagtgtattcacggcgggctgcgcaggtcaatgcattttataaactggcctttgcgttcgtcggaacggcttttttcgacgtatggagcctttgtgcgaaaatattgtatacaaaaaataaagtcattgtgttctatttgttgggtcgagcatctgatcattcagacctccaccgctttcccaataacaaaagaaggacggcaccatgagcgctttaaccttgaaaattgccacccaactggccagtcaggcccttgctgcagggcgcagtgttgcggcggcgccgctgactatcgcggtactcgacagcggcggtcacttgatcgccctgcaacgggaggacggcgcgagcctgttgcgcccgcagatcgccatcggcaaggcctggggtgcgattgccttgggcaaggggtcgcgcttgttggcgctggacgcacagcaacggccggcgtttatcgccgcattgaacagcctggggcagggcagtgtggtgccggcgccgggtggggtgttgattcggaatcaggaaggcgtggtgctaggggcgatcggcatcagtggggatacgtcggatattgatgagcagtgtgcgattacggcgatcgaaggggtggggttgatggcggatgccggggtgtctgcttgatgcttcgttgactgttcgggcctcatcgggggcaagtcgaatcgtcgcaccgcccctcccacacttgaattgcgaacaccgtcaattgtgggagggggcttgcccccgatgggcacagacaccacggtgtgtcagtccggctcacaacccttgagcaccaaccggatgatggtctgcgctgcggcttcgtaatcggcctcatccagcttggccttcccggtcaccgccgagatctgccagtcaaagtccgcgtaggtctgcgtggccgcccagatgctgaacatcaagtgattggggtcaatcgccgcgatcaggccgcgatccacccaatcctggatgcacgtaatgttgtgcttggcctgggcgttcaactgctcgacctgatcagcgctcaggtgcggggcgccgtgcatgatttcgctggcgaacaccttggaggcgaacggcaggtcacgggaaatgcggattttcgagcggatgtagttactcagtacttccttggggtcgccctgcggattgaatggcgtggacgccgccaggatcggctcgatgatgctttcgagcacctcgcggtagaggttgtccttggacttgaagtagtagtagacgttgggcttgggcagcccggccttggcggcgatgtcgctggttttggtcgcggcgaagcccttgtcggcaaactcctcgctcgccgcccgcaggatcttttctttgttgcgctcgcgaatggtgctcataaacctggagtttccttgccaaggctggcggttgcgcatggtagcaccggccatccgcgagcctcaacaatctgcccgtcggcccttgcgccgcgttatgctcgcgccatctcactcttacggaagcccgattcatggcaggaagcagcttgttggtattgatcgacgatatcgccgcggtactcgatgacgttgccctgatgaccaaaatggcggcgaagaagaccgccggggtgttgggcgatgaccttgcactcaatgcccagcaggtctccggggtgcgtgccgaacgggaaatccccgtggtgtgggcggtggcgaaaggctcgttcgtcaacaaattgatcctggtgcccgcagcactgttgatcagtgcattcgccccgtgggcggtgacacccttattgatgctcggcggtgcctacctgtgtttcgaagggttcgagaagctcgcgcataagtttctccacagcaaggaccaggaccaggctgaacacgcgcagttggccgaggccgtggccgatccggcaaccgacctggtggcctttgaaaaggacaagatcaagggcgccatccgtaccgatttcatcctttccgccgaaatcatcgccatcaccctcggcaccgttgctgacgcgcccctgatgcagcaggtgatcgtgctgtccggcatcgctatcgtcatgacggtgggcgtctacggactggtggccggtatcgttaagctggatgacctgggcctgtggctcacccagaagcccggccaggtggcgcgcagtatcggcggcggcatcctgcgggcagcaccgtacatgatgaagagcctgtcggtgatcggtacggcggcgatgttcctggtcggcggtggaatccttacccatggcgtgccggtggtgcatcactggatcgaaacggtcagccagggcgtgggtggggtggcgtggttggtgccggtgttactgaatgggatggtggggattattgccgggtcggtggtgctggcggtggtcagcatggtcggcaaggggtggaaagcactgaaggcctcatatgggaaataaaaaggccattcaaacgaatggccttttttgcgaacaggttttttgagtgcagtgctgacactgtcaggtagtgttcgcgcagacttccactgactaggctgatagcgttgagtgctgagggatgagcgaacctaggagcttgtcaaattcagaaccgggttcagccatttcacctaccccatgaaatgccttaagggtcatcggggttttggctccgtcgatggttttattaccgtttcgatcatgggatttgacccattgatcggcgtcgcgaagggatgcggccctatcttctggactgcgattcacatcgtcccagtcgcctacgcgtgccttaatcaaattgttaagagtagtgacatgatgttttttagtcaggggatctatgtaactgattttatggtgtaggtgagtgcctagtgaagaaagataaggggtgttttctgctttttcagtggtcatgccgtcgcgctgagtttcggaaatgaggtattcataaaacttttgaagttcagagccaggttcagtcaattcagacactgagtgatataacttacggctcgtatgcgttttggcaccgtcgatctcgtgattaccgttttgatcaaaattcctgactatgtcattggctctcagacgggaaatctgattttcttttgtaccgcgacgctcatcgtcccagtcacctacgagctgcttcaacatttttatgggggtagtaaacgtttcctcattagtcaccgggtcaaagtgcacgatgtgttgattgagggtgcggcctggtgaagaaagataaggggtttcatctggtttctctttcatcacgttctcggaatgattcgaggcctgtgaagaaagtgcatgtgccgcatagaaaggttgctgggcggcgggggttatagggagcgacatgtcatattccttgtgtgatgttgaatgtaacaggtgttgagaatctagtctgtttccacaaggtgagtggtgaatgagaggacgtggttcataaaatatatattttgtttcaattatgagaaatgcgttttgacgggtatgggatctttcgttgcaatcgtaggggtgggagctgatgtagcaataagagtcggggatgtcgggttttgttaaggggttgatgtatgaggtttattgatcgagtgtaaataataatttctggaatatttcagattgttgtgtgaattgcatcaggtacatcatttgatgcgcagtgccgagtgtgtttttgtgatcgagtggttccacagataagtaggttggaggaagggggctagtagtgtgcagggatgatggaaataaaaaggccatccggattgctcgaatggcctttttcttactgagcttcttttactcagctatttgtaactttcgagactcggtatatatataccgcaccttctcatactcaaacggcgagttcatctgcccataccggaagctggtctgataacgtttatccaccgcacgcaacgcccagatttccgggtggttggagctgacttccgacacgttgaggaagttgatctgggtttccgcgccgtagtcgacgatcaggccggtggtgtcgcgcaggttcgacgggccgaagatcggcagcaccaagtacgcgccgccgggcacaccgtagaagcccagggtctggccgaagtcttcgctctggcgcggcaggcccatggcggtggccgggtcccacaggccggcgatgccgatggtggtgttgagcagcaggcgcccggtggtttccagggagcggtggcccttgagttgcagcaggctgttcagcaggttgggcacgtcgcccaggttgttgaagaagttgctcacaccggtgcggaggaagctgggtgtcacataggtgtagccattgaccaccggcaggaacacccattggtcgaagcggtagttgaagtggtacacgcgacggttccacgactccagcgggtcatacacgttgagtgcggtgagcgacgagcgctcgaactcacgctgatccaggcctgggttgaacttgagcttgctcagcggttccttgaaaccgtcggcgtccacgttgaccggctcatgggccttgctgttgtcggcattggccacgcctgcgcacatcaaggcggcaagcagcagaagatatttagccacggaagaactccagcatggcgtcggcgttgacgcggtaattgaggttgccgcagtggccgcccagcgggtagacggtcaagcgatcgccgaaggttttacgcaggaaaccgaggtcgccagggccgaggatcacgtcgtcggcgttatgcatgacggcaattttcgggctgttgtgcaggtagtccttgagggcgtacaggctgacctggtcgaccagttgcaacaggctgccgccgtcggagcgtgcgcgccacatcggaatcacttgctcggtgaggtagcaatcgaagtcgcattgcagcgcacgcttgaggaacggcgtgaggctggtgccttcggtgatcgggtatttcggtgggatgatcaggccacgacggttgatcaggtccgaagtaaaggcgatgtcggccgctgaaaagcggaacgaggtgccgatcagcatggccatctgttcgttggtcaggtgctgcttggattgctggaagtcgtagagcagggcgtcgttgaggtcgatgtagcccttttgctggaagtagcgggtcagcttgttcagcaccagttcatagaaggtggtggtgttgttgatgcccttgacctcggtctgtaccagcttgtcgaggttggtgatcgaggtgtagaggttgaccggcgggttcagcagcaagactttcttgaagttgaagctgcgacgggtctcgtccagcttggccacgaatgccgcatccaggccgccgaggctgtagccggtgaggtagaagtcggtcaccggcagcgaggcgttctgtgcgcgcacggcctgcatcacgcggtacatgtcttcggcgtcttcctgggtgatccccggggtggcgaagcgtgaggcggcgctgatgaagtcgaagctggtgggcgacgacagttgcaccacgtggtagccggcctggtaatacagcttcttcaagtattcgttgatgctgctgtcgaatcgcgcgccggtgccggcgatcaggaatatcagcggcgcggcacggtcctgcttggcgatgcggtaggtgagtttcttcaccgcccagaagttgtccggcaggctgaactcgcgctcggggcgcatgttcagggtgtagtcggattggttgatctcgtcatcgctcggcaatttgggccgaaggtcgggcggtgtagtggcgatggtcgcttcaaacgggttggccaaagggtagccatagctggcttggtcaatgtcgacggccagtgctgacgcactcaaaaaaaggctgcccagcaaggcagcacagcgcaaggaacggagcatgacttaatccctaggaggaaacgtgcttaatgaagttcgcaggctatgaccaccgcgttgtcaccgaagtgccagcactcggcacgaaaagtcggaaaataacgtcggaatcggggtaatagtagccagacgatacactttgccacgcattggtgaacactaattgtgtgtatgcgccttgctaacggccaccggggcattaagctgggcgccgtttttgcctatcggagtggcccatgtcccgtcgtttaccgctgatttttctgctaattgccctgccgctatggctggctgccagttacggcgcgcgctttggctttatggaagatggccagtgggtcggcatctgcatcgatgaggccagccgctgggaatgccaattgcgttcgaacctgggcctgatgatccacttcaaggtgctcggttgggcagcgttgatcacgtcggtgctggcgttttttgtgccggggcgtgcagggtgggggttggcggtgctgggtatggtgttcgggttgccggcattggcgttgtacaacaccacgtttgcggtgtttgcggtggtgatcgcggggttgcggttggtcaggaaagggcgggcagcctgatagggcctcatcgggggcaagccccctcccacattggtaatgcactgacctgtgggagggggcttgccccgatagcggttttagaccttgcgcacccgcaagcagcgccacaaggctgccgtcatgagcaggctcactaccgcccaaccccaggcctgctggttcaacaacccttcacggtacaactgcggcgcaatacccgcaccgatgatgaaggccagcaacgcaatctcccgacgcggcccggttaccgggcgcaccaggtacaccagggctggcaacaccagcgcggcgctagggaaactgcggtagcgtgggtcaaacaccagtgccagcatcattactgcccctgcaaacccggcaatcgccaccagccagcctgcgcgttgctccagccagttgaaggcgcgtgcgcgccaatcttcccgtgagctgaggctcaaggcggcatgggtcagcaccagcaggttcaacaccaccagcaagcctgcccacacccattcatcgttgaagcgcgcggtgacgcgcgtcagctcggcccaggtgccgatggagcaggctgccacggcacccagcagtggcagggcgatggcggcccgcacactgcgcacgcgaccacccagcaccagagtgcccagcaggatgattccacctacacccagccatagcggccagtacggcacattggtcacgggcccggcgaggatgcccttgtcctggcgatcggcatcgaacaggccccagtaaccgcccacggcgccttcgcttgcgcgcttccatggctggtcaaaggcttcgatcaggttgtagcgccagccattggcttccgccatagccacgaaacctcgcatgaacttggcttcgttgacccggctcggtacggcggtttcgcgctggcggccttcgctgggccagccggtttcaccgatgaggatgtccttgggcgcgaatttgttgccgaaggtctggcgcacatcacctacgtgcttgagtgcctggtcgatgccagaagggtcatcttcccagtacggcagcaggtggatggtcaggaagtccacggccggcgcgatttccgggtgttgcagccagaactcccacacgtccgcgtaggtcaccggctgcttgatccggcttttgacggtctggatcagcgtcaccagctgtttggcggtgacttctttacgcagcagcgcttcgttgccgacgatcaccgaggtcactacatcagggttggcgttggctgcggcgatcaactcttcgatttctttctcggtcgccaccgggtcactactgacccaggcaccggccatcaccttcagtccatgcttgcgtgccatctccggcaaggcttccaggccggtcatggagtaggtgcgaatgcattcgaagcgcgtggccagcagggccaggtcggcatccatgcgttccgggcgcagtgtgaacggctggtcaaacggggattggtctttatcgaacggtgtgtaggaagcacattgcatcttgtgtgtggcactggcgacatcgggcagtaccacgggccggccgaggccataccagtaaccgatcagggccagcaggccgaggagcaaggcgcagaaatagggcagggcagggaagcgggcagtcgcaggcatggtcggcttatctgggggagcaaaggcgcgcatcttacccggatttgggccgtcccagtggggcagcataattttgacatgcaaagttcgggcgggattttggcgtcacgtcctacaaaatgccctgctggctatgtgatgtcgtttcttgcttgtatgaggtcgctgacagagcaggtcgaaggacgcggcaggttgatgatcgaagtgtcagcactccactgatgccgcagacaccggatcgatgcgcgtgacgggggcgcggtgcaccacataacaacaggttgacgtcgctcggcatccgtcgggcgcagcactttcggggaagtacgatgaagatgcgacgactcttgggcgcagctgccactctggtagttgcgatgagctccacactggccagcgccgacagcaaaaccctgagcatcggctatgtggacggctggtccgacagcgttgccaccacacacgtggcggcagaggtgatcaaggccaagctcggttatgacgtgaaactgcaagcggtagccaccgggatcatgtggcagggcgtggccactggcaagctcgacgccatgctgtccgcctggttgccggtgacccacggtgagtactgggccaagaacaaggacaaggtggtcgactacggccccaacttcaaggatgcgaagatcggcctgatcgtgccggagtacgtcaaggccaagtccatcgaagacctcaagaccgacaccaccttcaagaacaagatcgtcggtatcgacgccggctcaggcgtgatgctcaagactgacgaagccatcaagcagtacggcctcgactacaaactgcaagccagctcgggggcggcgatgatcgccgagttgacccgtgccgaagacaaacaggaatccatcgcggtcaccggttgggtgccacactggatgttcgccaagtggaaactgcgtttcctggacgacccaaaagggatttatggtgctgctgaaaccgtcaacagcatcggcagcaagggcctggagaagaaagcgccggaagtcgcggccttcctgaagaaattccagtgggcctccaaggacgaaatcggcgaagtcatgctggctatccaggaaggcgccaagcctgatgcagcggccaaggattgggttgccaagcaccctgagcgtgtagccgagtggaccggtaagtaatacggtaagcaaaacccctgtgggagggggcttgcccccgatgagggcgtgtcagttgaaatatcaatgactgatacaccgccatcggggggcaagtcccctcccgcattagtttcaccctctgcaaatcttcctgcattctcaaaacccctcgctacactcgatctaagactaaggtcgtctggaacctgttccgcagccgcatacagtggatacgttccaataataaaaaagctgtgctgcgaggataaaaacaatgaacgacagcatttacctctcgattcaaaacagcccgcgtttcaaggagctggtgagaaaaagggaaaggttcgcctggattctctcggcgatcatgctagggctttactccgctttcatcctgttgatcgcctacgggccacaagtacttggggccaagctcagccctggttcgtcgattacctggggcattcccttgggcgtcgggctgattgtgtccgccttcatcctgaccggcatctacgtgcgccgggccaatggcgagtttgacgacctgaacaatgcgattctcaaggaggctgcgcaatgatcggtcgtctactggcaatattcggcgcttcactctttgctccggccgtttgggcggcagacgcattgaccggtgaagtgcacaagcaacccctgaacatatcggccatcgtgatgtttatcgcgtttgtcggtgcgaccctgtgcatcacctactgggcttccaagcgcaacaaatcggcagctgactactatgcggccggcggcaagatcaccggtttccagaacggcctcgcaattgccggcgactacatgtcggcggcgtccttcctggggatttccgcactggtctacacctccggttatgacggcctgatctactcgatcgggttcctggtgggctggccgatcattctgttcctgatcgccgagcgcctgcgtaacctgggcaagtacacctttgccgacgtggcgtcctatcgcctgggccagacccagatccgcagcctctcggcctgtggctcgctggtggtggtggcgttctacctgatcgcgcagatggtgggcgcgggcaagctgatccagctgctgttcggcctggattaccacgtagcggtgatcctggtgggtatcctgatgtgcatgtacgtgctgttcggcggcatgctggcgaccacctgggtgcagatcatcaaggcggtgctgttgctgtccggtgcctcgttcatggcgctgatggtaatgaagcacgtcaacttcgactttaacgcgctgttctccgaggcgatcaaggttcaccctaaaggtgaagcgatcatgagccccggcggtctggtgaaagacccgatctcggcattctccctgggcctggcactgatgttcggtaccgccggcctgccgcacatcctgatgcgcttcttcaccgtgagcgacgccaaggaagcgcgcaagagcgtgctgtatgcaactggctttatcggctacttctacatcctgaccttcatcatcggtttcggcgcaatcctgttggtgagcaccaacccggcgttcaaggatgcggctggcgccttgcttggcggtaacaacatggcggcggtgcacctggccaacgcggtgggcggcagtatcttcctgggcttcatctcggcggtggccttcgccaccatcctcgcggtggttgcaggcctgaccctggccggtgcgtcagcggtgtcccatgacctgtacgccagtgtgatcaagaaaggcaaggccaacgacaaggatgagattcgcgtctcgaagatcaccaccatcgcgttgggcgtattggcaatcggcctgggtatcctgttcgaaagccagaacattgcgttcatggtcggcctggcgttctccattgctgccagctgtaacttcccggtgttgctgctttccatgtactggaaaaacctcaccacccgtggcgcgatgatcggcggctggctgggcctggtcagtgcggttggcctgatggtcctgggcccgaccatctgggtctcgatcctgcaccatgaaaaagcaatcttcccttacgaatacccggcgctgttctcgatgatcattgcgttcgtcggcatctggttcttctccatcaccgacaagtcggcggcggcagagaaagagcgtgcgctgtacttcccgcagtttgtgcgttcgcagactggcctgggggcgagtggggcggtgtctcactaaggtcgtagctggatagggaaatgccccggtcgaaaggccggggcatttttttgtctggggttctgcgttatgggtactcgcgtcatcgggggcaagccccctcccacatttgactgtattcacaaatagacatgtttgaaccgcgcccggtgtgggaggggggcttgcccccgattgcggtcgaccagttgtcacaaacaaaaacggcctccactaggggaggccgttttcggtgcaactaagcgatgcttacttgcgatcttccagcttggtgatgtcacgcgactcgtagccggtgtacagctggcgcgggcggccaatcttgtacgggctggagagcatttctttccagtgggagatccagcccacggtccgcgccagggcgaagatcacggtgaacatgctggttggaatgccgatcgccttgaggatgatccccgagtagaagtcgacgttcgggtacagcgagcgttcaatgaagtacgggtcggtcagggcgatctcttccaggcgcatggccagttcgagttgcggatcgttcttgatgcccagttccttcaacacttcgtcgcaggtctgcttcatcacggtggcacgcgggtcgcggttcttgtagacccggtgaccgaagcccatcaacttgaacggatcgttcttgtccttggccttggcgatgaatttgtcgatgttcgagacatcgccgatttcatcgagcatggtcaatacggcttcgttcgcaccgccgtgggcagggccccacagtgcggcgatgccggcggcgatacaggcaaacgggttggcacccgaagagccggccagacgtacggtcgaggtggaggcgttctgctcgtggtcggcatggaggatgaagatccggtccatggccttggcgagtgtcgggctgatcggtttgatctcgcacggcgtgttgaacatcatgtgcaggaagttttccgcgtacgtcaggtcgttgcgcgggtacatcatgggttggcccatggagtacttgtaaaccattgcggccagggtcggcatcttggcaaccaggcggatcgcggagatttcgcgatgctgcgggttattgatgtcgagggagtcgtgatagaaggccgacagggcgccgaccacgccgcacatgacggccatcgggtgggcgtcgcgacggaagccgttgaagaaggtcttcaactgctcgtgaaccatggtgtggttcttcacggtgctgacgaactgggctttctgctcggctgttggcagttcgccatttagcagcaggtagcaggtttccaggtagtccgacttctcggccagttgctcgatcgggtagccgcgatgcagcaaaatgccattatcgccatcgatataggtgatcttcgactcgcaagaggcggtcgacatgaagcctgggtcgaatgtgaaacggcccgtggccgtcaggccccgtacgtcgataacatcgggaccaacggtgccggttaaaatgggcagctcgacgggggctgcgccctcgatgatcaactgcgcttttttgtcagccatgtggcctcctatttatgcttcaaatcatcagacagaccccccacgcagggcccgcaccactatattgatataaatccagatgtcaatttgcctaaagtcttgcgccagaaggctttaaccgtactttttcctcgaaattgcctgccatttacgccttttattctcccagcgcaatccgctattagggtgaggagtgcgcgttgtcattagtaacctaactgtctatactcggccaccgaccgccaagggcttttgggcttgctttcattgggggtcgcactccctgggtggtgcttacctgaccagtgcactccccaacaactttgccctgattgttaggggctcttcagtgtgaaaaaaagccgtgaatagccaacgacctgtaaacctagacctaaggaccatcaaactccccatcaccggcgttacgtcgttcctgcaccgtgtttccggcatcatcctgttcctgggctcgggcatcatgctttatgcattgagcaaatccctgggttccgaggaaggatacgccgaggtgaaggcatgcttgaccagcccgctggccaagttcgtagcatggggcctcctgtcttctcttctgtatcacctggtagccggtgtgcgccacttgatcatggacatgggcatcggtgagacgctggaaggcggccgcctgggctcgaaaatcatcatcgccatttccgtggtgctgatcgttctggcaggagtttggatatggtaaccagcgttacgaatctgtcgcgttcgggcctctatgactggatggcacagcgtgtgtctgcggtcgttctcgcggcttatttcattttcctgatcggatacctcgtcgcaaatccgggcattggctatgagcaatggcacggcctgttttcccacaatgcgatgcgaatcttcagtctgctggcccttgttgccctgggcgcacacgcctgggtaggcatgtggaccatcgcgaccgactacctgacgccgatggcgctgggcaagtccgcgactgcagtacgtttcctcttccaggcagtctgcggcgtcgcgatgttcgcttacttcgtctggggtgtgcagattctttggggtatctgattcatggctaacattccaactatttcattcgacgccatcattattggtggcggcggtgctggcatgcgcgctgcgctgcagctggcccagggcggtcacaagactgccgtgatcaccaaggtgttcccgacccgttcccacaccgtatcggcccagggtggcatcacctgcgccatcgcctccgccgacccgaacgatgactggcgctggcacatgtacgataccgtcaagggttccgactacatcggtgaccaggacgctatcgaatacatgtgtcaggaaggcccggccgcggtgttcgagctggaccacatgggtctgccgttttcccgtaccgagcaaggccgtatctaccagcgtccattcggcggccagtcgaaggattacggtaaaggcgggcaggctgcccgtacctgcgctgcgtccgaccgtaccggtcacgcgctgctgcacaccctttatcagggcaacctgaaagccggtactacgttcctgaacgagtactacgcggttgatctggtcaagaacgcacaaggcgagttcgtcggtgtgatcgcgatctgcatcgaaaccggtgaaaccacctacatccgcgccaaggccaccgtgctggcgaccggcggtgcaggccgtatctacgcgtccaccaccaacgccctgatcaacaccggtgacggcgtcggcatggcactgcgtgcaggtgttccggtacaagacatcgagatgtggcagttccacccgactggtatcgccggcgccggtgtactggtgaccgaaggttgccgtggtgaaggtggttacctgatcaacaagcacggcgagcgtttcatggagcgttatgcgccgaacgcgaaagacctggctggtcgtgacgttgtggctcgttcgatggttaaagagatcatcgccggcaacggctgtggtccgaatggcgaccacgtactgctgaaactcgatcacctgggcgaagaagtactgcacagccgcctgccaggtatctgcgagctgtccaagacgtttgctcacgttgacccggtagttgccccggttccggtcgttccgacttgccactatatgatgggcggcgtgccgaccaacattcatggccaggcgatcacccagaacgctgaaggcgaggatgaaatcatccacggtctgttcgccgtaggcgaagtggcctgcgtatcggttcatggtgccaaccgcctgggcggcaactcgctgctcgacctggtggtcttcggtcgtgctgctggcctgcacctggaaaaagcgctgaccgacggcatcgaatacgatgacgctaccgacgccaacatcgaggctgcactggcccgtctgaacgcgctgaacgagcgcactgatggcgaagacgtggcaaccctgcgtcgcgagctgcaaagctgcatgcagaactacttcggtgtattccgtaccggcgaatacatgcagaagggtattgcccagctggccgatctgcgcaagcgtatcgccaacgtcaagatcaacgataagagccaggcgttcaacaccgctcgtatcgaagcccttgagctgcagaacctgctggaagtggccgaagcgactgcaatcgctgccgaggttcgtaaggaatcccgtggtgctcacgcccgtgaagactttgaagatcgcgacgacgaaaactggttgtgccacaccctgtacttcccgggtgacaagcgcgtgaccaagcgtgccgtgaacttctcgccgaagacggttccgacgtttgaaccgaagattcggacttactaagggtggctgccatgttgaaagtcagtgtttatcgctacaaccctgatcaggacgctgcgccgttcatgcaggaattcaaggtcgataccggtggtaaagacctgatggtgctggatgtactggcactgatcaaggagcaggacgaaggtttctcctatcgtcgctcttgccgtgaaggtgtgtgcggttccgacggcatgaacatcaacggcaaaaacggcctggcgtgcatcacgccgctgtccgccgtggtcaaaggcaacaagctgatcgttcgtcctctgccaggtttgccggttatccgtgacctggtcgtcgatatgagcatcttctacaagcaatacgagaaagttaagccgttcctgcagaacgacacgccggctccggccatcgagcgtctgcagtccccggaagagcgtgagaagctcgacggtctgtacgagtgcatcctgtgcgcttgctgctcgacgtcgtgcccgtccttctggtggaacccggacaagttcctgggtccagccgccctgctgcaagcgtaccgcttcctggcagacagccgtgacaccaagacgtccgagcgtctggcttcgctggatgacccgttcagcgtattccgctgccgcgggatcatgaactgcgtcaacgtatgtcccaaaggcctgaacccgactaaggccattggtcacatccgcaacatgctgctgcagagcggcgtgtaactgacgttgtagtaaaagcaggaccgttgtgcccgtaaatgctacggcgcaggcttcaaccggcgccgtagttttaacttgagcagcgacttacaaagccgcggctcttattttgaagaaatgagacaagcaggggcattcgggttggtacccgaactatcagcgtgatcctaagtggcttgttttggtcgctgcacttggccttttgcaagcaaactcggtgttttcgccggtggtgtccccaaatcgagggtgaccaagcatgcaagaaagcgtgatgcagcgcatgtggaacagcggctatctttcaggtggtaacgctgcctatgtggaagagctttatgagctctacctgcacgaccctaacgctgtgccagaagaatggcgcaccaaatttcagacgttgtcttcagacggcaacgctgccaccgatgtatcgcatgcaacaattcgcgatcagtttgtgctgctggcaaagaaccagcgccgcgcccaaccggtttccgccggtagcgtgagcagtgagcacgagaagaagcaagttgaagtattgcgactgatccaggcctaccggatgcgcggccaccaggcggcccagcttgacccgctggggctctggcagcgtcctgcacctgctgacttgtcgatcaatcattacggcttgaccaatgccgatcttgatacgaccttccgtgccggcgacctgttcatcggcaaagaggaagcgagcctacgcgaaattcacgaagcgttgcagcagacatattgccgcaccattggcgctgagttcacgcacatcaccgattccgagcaacgccactggttccagcatcgcctggaaggtgtgcgtggccgtccggtgctgtccgccgacgtacgcagccacctccttgagcgcgtaaccgctgccgaaggcctggaaaaatacctgggtaccaaatacccgggcaccaagcgtttcggcctggaaggcggcgaaagcctgatcccgatgctcgacgagctgatccagcgttccggttcctacggcaccaaggaaatcgtgatcggcatggcccaccgtggtcgcctgaacgtgttggtcaacaccttcggcaagaacccgcgtgagctgttcgacgagttcgaaggcaagaagaaggtcgagctgggttccggtgacgttaaataccaccagggcttctcgtccaacgtgatgaccaccggcggtgaagttcacctggccatggccttcaacccatcccacctggaaatcgtttctccagtggtcgagggttcggtgcgtgctcgccaggatcgtcgtaacgacaccacgggtgaaaaggtcctgccgatttccatccacggtgacgcggcattcgccggtcaaggcgtggtcctggaaaccttccagatgtcgcagacccgcggcttcaagaccggcggtaccgttcacatcgtcatcaacaaccaggttggcttcaccatcagcaacccgctggatgcgcgctccaccgagtacgccaccgacgttgccaagatgatccaggcaccgatcctccatgtgaatggtgatgatccggaagccgtgctgttcgtgacccaactggctgtcgactaccgcatgcagttcaagcgtgacgtggtgatcgacctggtctgctaccgccgtcgcggtcacaacgaagccgacgaaccaagcggcacccagccgttgatgtaccagcagatcaccaagcagcgcaccacccgtgagctgtatgccgaaagcctgaccaaggccggcgtggttgacgatgcacgtgttcaggcgaagatcgatgaataccgcaacgcgctggacaacggtctgcacgtagtgaaaagcctggtcaaagagccgaacaaagagctgttcgtcgactggcgtccatatctgggtcacacctggaccgcgcgtcacgacacctcgttcgatctgaaaaccctgcaggaactgtccgccaagctgctggaaatcccggaaggcttcgtcgtacagcgccaggttgcgaagatctacgaagaccgtcagaagatgcaagccggcggcctgccgatcaactggggttacgccgaaaccatggcgtacgcgaccctggcgttcgaaggtcacccgatccgcatgaccggccaggacatcggccgtggtacgttctcgcaccgtcatgcggttctgcacaaccagaaagacgctggcacctatgtgccgctcaagcacctgtacgaaggccagccacgcttcgacctgtacgactcgttcctgtccgaagaggccgtactggcgttcgaatacggttactcgaccaccacgccgaacgcgctggtgatctgggaagcccagttcggcgacttcgccaacggtgcccaagtggttatcgaccagttcatcaccagcggcgagcacaagtggggtcgcctgtgcggtctgaccatgctgttgccacacggttatgaaggccagggtcctgagcactcctcggcccgtctggagcgttacctgcaattgtgcgccgagcacaacatccaggtatgcgtgccgacgacccctgcccagatctaccacttgctgcgtcgccaggtgatccgcccgctgcgcaagccgctggtagtgctgacaccgaagtcgctgctgcgtcataaattggccatctcgaccctggaagatctggctgatggttcgttccagaccgttattccagaaatcgacacgctggacgcggccaaggtgactcgcctggtcctgtgcagcggcaaggtctactacgacctgctggaaaaacgtcgtgccgaaggccgcgaagacatcgccatcgtgcgtatcgagcagctttacccgttcccggaagacgacctgatggaggccattgcgccttacaccaacctcaccaacgtggtgtggtgccaggaagaaccgatgaaccagggcgcgtggtacagcagccagcatcacctgcgtcgcagcatcggcaaccacaacaaggccctgggcctggaatatgccggccgtgatgcttccgctgcacctgcgtgtggttatgcgtcgatgcacgccgagcagcaggaaaaactgctgcaagatgctttcactgtttaacgccttcgcgctgactgaaaccgaattttaaggacccacagataatggctatcgaaatcaaagccccgtcattcccggaatcggttgccgatggcaccgttgccacctggcacaagaaaccaggcgacgctgtaaagcgtgacgacctgatcgtcgacatcgaaaccgacaaagtcgtgctggaagtgttggccgaagctgacggcgtgctgggcgcaatcgttgccgaagaaggcgctaccgttctgtcgaaccaggtactgggctcgatcgaagagggcagtgctgctgccgctgcgcctgctgctgcgccggccgccgccgctgctgcgcctgctgccgctccggctggtggcgctgaagacccgatcgctgcaccggctgcccgccagctggctgaagagaacggcatcaacctggcctccatcaaaggcaccggcaaagacggccgtgtgaccaaggaagacgtggttgcggcggttgaagccaagaaaaacgctccggctgccgcacctgccaaggctgctgccccggctgctgctgcgcctgtgttcgccgccggcgaccgcaccgagaagcgcgttccgatgacccgcgtacgtgccaccgtggccaagcgtctggttgaagcccaatcgaacatggcgatgctgaccaccttcaacgaagtcgacatgaccgaagtcatggccctgcgttcgaagtacaaggatctgttcgagaagtcccataacggcgtgcgcctgggcttcatgtccttcttcgtgaaagcggccaccgaagcgctgaaacgcttcccggcagtcaacgcttccatcgacggcaacgacatcgtttaccatggctacgcagacgtcggcgttgccgtgtccagcgaccgtggcctggtggttcctgtactgcgtaacgccgagctgatgagcctggctgaaatcgaaggcggcatcgccactttcggcaagaaagcccgtgacggcaagctgaccatcgacgagatgaccggcggtaccttcaccatcaccaacggtggtaccttcggttcgatgatgtcgaccccgatcgtcaacccgccacaagccgcgatcctgggcatgcacaacatcatccagcgtcctatggccatcaacggccaggtcgtgatccgcccgatgatgtacctggcgctgtcttacgatcaccgcctgatcgatggtaaagaagccgtgactttcctggtgaccatcaagaacctgctggaagacccggctcgtctgttgctggatatctgattgaagcagctgcaagttgcgagctacaagctgtaagaaaaagcagcttggcttgcagcttgcggctaaaagcttgtcgcaaatagaggatctattttcatgacacagaaatttgacgtcgtagtgattggtgcaggtcctggcggctacgtagccgctatcaaggccgcacaactgggcctctcgactgcttgcatcgaaaaatacaccgacaaggaaggcaaactggcactgggcggtacttgcctgaacgtcggttgcattccttccaaggcgctgctggacagctcctggaaattccacgaagcccaggacggcttcgcgatccacggcatcaaccatgctggcgtgaccatggacgtaccggcgatggtcggtcgtaaagccaacatcgttaagggcctgacttccggcgttgccaccttgttcaaggccaacggcgttacttccctgcaaggccacggcaaactgctggccggcaagaaagttgaaatcaccaagccagacggttcgactgagatcatcgaagccgagaacgtgatcctggctccaggttcgcgtccaatcgacattccgcctgctccagtcgacaacaacgttatcgttgattcgaccggggccctggaattccaggctgtgcctaagcgcctgggcgtgatcggcgctggcgtgatcggcctggaactgggttcggtctggtcccgcctgggtgctgaagtgaccgtgctggaagccctggacacgttcctgctggctgccgacacggccgtttccaaggaagcgctgaaaaccctgaccaaacaaggtctggacatcaagctgggcgctcgcgtcaccggctcgaaagtcaacggcgaagaagttgtggtcaactacaccgacaaggatggcgaaaaaaccatcactttcgacaagctgatcgtagccgttggtcgccgtccagtgaccaccgacctgctggcatccgacagcggcgtgagcatcgacgagcgtggtttcatccatgttgacgatcactgcgcaacttccgtgcctggcgtgtacgccatcggcgacgtggttcgcggcatgatgctggcgcacaaggcttccgaagaaggcatcatggttgtcgagcgcatcaagggtcacaaaacccagatgaactacgacctgatcccatcggttatctacacccacccggaaattgcatgggtcggcaagaacgaacagcagttgaaagctgaaggcgttgaagttaacgtcggcaccttcccgtttgccgcttctggccgtgccatggcagccaacgacaccggtggttttgtcaaagtcatcgctgatgccaagactgaccgcgtattgggcgtccacgtgattggcccgagcgctgcagaactggttcagcaaggcgcgatcggtatggaattcggcaccagtgccgaggacctgggcatgatggtcttctcccatccgaccctgtccgaagcgttgcacgaagctgcgttggcagtgaatggcggcgccatccacatcgccaaccgcaagaagcgctaagcgagataataagaaaccacggcggagttgcccgtcgtgagccttgcgcgcaagactcaccgcggaatatccgctggacgcagccttgcgcagctttacgggccttgagccccgcaagttgcgcaagcagcagtcacaggtggcgcggcactcataatgagcgcagcgccgaatgcgcagtacctaacgaagacggtaaaaagcatgaatcttcacgagtatcagggtaagcagctgttcgctgaatacggcctgccagtttccaagggctacgcagtagacaccccggaagcagcagcagaagcttgcgacaaaatcggcggcagcgagtgggttgtcaaagcccaggtccacgccggtggtcgcggtaaagcgggcggcgttaagctggttcgcagcaaagaagacgccaaggccttcgcacagcagtggctgggcaagcgtctggtgacttaccagactgatgccaatggccagccagtcaccaagatcctggttgaatcgtgcactgatatcgctaaagagctgtacctgggcgctgtcgttgaccgttcgagccgtcgcatcgtgttcatggcttccaccgaaggtggcgtggacatcgagaagatcgctcacgaaaccccagaaaaaattctgaaagccactatcgacccactggttggcgctcagccattccagggtcgcgagctggctttccagctgggcctggaaggcaagcaagttgcccagttcgccaagatcttcgtgggtctggccaaactgttccaggatcacgatctggccctgctggaagtgaacccgctggtgatcaaggctgacggcgatctgcactgcctggacgccaagatcaacatcgacgccaacgccatgtaccgtcagcctaagctgaagactttccacgatccttcgcaagacgatccgcgcgaagcgcacgctgccaagttcgaactgaactacgtagccctggaaggcaacatcggctgcatggtcaacggtgccggcctggccatgggtaccatggacatcgtcaacctgcatggcggcaaaccagccaacttcctcgacgtgggcggtggtgctaccaaagaacgcgtaaccgaagcgttcaagatcatcctgtccgactccaacgtcgctgcagtactggtcaacatcttcggcggcatcgttcgttgcgacatgattgccgaaggcatcatcggtgcagtgaaagaagtcggcgttaaaatcccggttgttgttcgccttgaaggtaacaacgctgaactgggcgctaaagtactggcagaaagcggtttgaacatcatcgcggctaccagcctgaccgacgctgctcaacaagttgtcaaagctgcggagggcaaataatgagcgtcctgatcaacaaagacaccaaagttatctgccagggtattaccggttcgcaaggtagtttccacacccagcaagccatcgaatacggcaccaagatggttggcggcgtaactccgggcaaaggcggcaccgagcacttgggcctgccagtgttcaacaccgtgaaagacgctgtagctgccactggcgccaccgccagcgtgatctacgttccagctcctttctgcaaggactccatcctggaagcggcattcggcggcatcaagctgatcgtctgcatcaccgaaggcattcctaccctggacatgctggacgctaaagttaagtgcgacgagctgggcgtagtcctgatcggccctaactgcccaggcgtgatcactccaggcgaatgcaagatcggcatcatgccaggtcacattcacttgccaggtaaagtcggtatcgtttcccgttccggcaccctgacctacgaagcggtcaagcaaactactgacgccggtttcggtcagtcgacttgcgtcggcatcggcggtgacccgatcccaggctccaacttcatcgacatcctgaagctgttccaggaagacccgaagaccgaagcgatcgtgatgatcggtgagatcggcggttcggctgaagaagaagcggctgcctacatcaaggcacacgtgaccaagccggttgtttcctacatcgctggtgtgactgcccctgcgggcaagcgcatgggccatgctggcgcaatcatctctggcggcaaaggcactgcagacgagaaattcgctgcgctgcaagacgcaggcgttaaaaccgtgcgttcgctggcagacatcggcaaggccctggccgagctgaccggttgggctgtcaagtaagctctatgcttagttgacgccgtaccaacacaaaggccaccttcgggtggtctttgtgcgttccggggttaagtaaagatcaaaatgtgggagggggcttgcccccgattgcagtgggtccgtcaataaatacagtgactgacacgccgccatcgggggcaagccccctcccacatttgcctgtattgccaaattaggtatgaaaatgcgacatgcagatgtcgcttatcggacagtccgccccgcaacagtgcgttcgtcagccaatttctgtaccctagccgcctctttatgcgtgcgcatcccaaaaggaagccccgcgctagaccggtcggctcccataagggccggcagcatttccctcatccatagggaatccctctctaaattccgattcagtagtgtggtatttcctcaaatgaaagtgttgaaaagccaggacatcctggcgctgggctttatgacttttgccctgttcgtgggcgccggcaacatcatcttcccgcctatcgttggtttgcagtccgggcctcatgtctggatggcagcgttgggcttcctgatcaccgccgtgggtttgccggtggtcaccgtgatcgccctggccaaggtcggtggtggcatggacgcgttgagcagcccgatcggcaagatcgccggtggcctgctggcggcggcggcgtatctggcggtagggccgctgttcgctaccccgcgtaccgcgaccgtgtccttcgaagtgggcctggcgccgctgaccggcgagagcccgctggcgctgttcctctacagctcggtgtacttcctggtggtgttctttgtctccctgtacccaggtcggctgctggacaccgtgggtcgcttcctggcgccgctgaagatcatcgccctggccatcctcggcatcgccgcgtttgccttgccggccggtgacgtgggcgtcgctaccccggaatatgtggccgcaccgttttcccaaggctttatccagggttacctgaccatggataccctgggcgcgctggtgttcggcatcgtgatcgtcaacgcgattcgctcccgtggcgtcgagtcgccgaagctgatcacccgttacgccatcattgcgggcctgattgccggcgtgggcctggccctggtgtacttcagcctgttccgcctgggttcgggcagccatgccgtggctgccggtgccacaaacggtgctgcggtgctgcacgcctatgtgcaacacacctttggatccctgggcagcggcttcctggccgtgctgatttccctggcgtgcctggtgactgcggtgggcctgacctgtgcctgcgccgagtacttcagcaaaatcctgccgctgtcctacaagaccctggtggtgatcctggcgctgttctcgttgttcgtgtcgaacctgggcctgaccaagctgattgccttctcgatcccggtgctgaccgcgatctacccgccgtgcatcgtgctggtggcgctgagcttctgcaaagacttctggcaggagcagggccgcatcgttggtccggtgatgctggtgtcgttcatctttggctgcatcgatgcgctcaagggcgctggcttggcgggttggatgccttcgcccctggcgaacctgccgttgagcgaccagggcctggcctggctggtgccgtcggtgatgacgctggtcgtggcgttcggggttgatcggatgctcggcaagcgcagcgaagctatcgcataaacccatgtttcccgctgtactgaaatgccccgtatcaatcgatatggggctttttttatgggtgaacggcagtgtctttttctgtgcactaacgtcgaactgacgcaaaagcgtttcagccctctttctgcaaaggacccgcatgtcgttcatcgaaaccaatcagatccacctgcttgccgccctgtggttcgccctttgctggggcggctatacccgatacgccatttggaaggcccgtgacacggcctgcctcgccagcgtgctgcatctgtaccgcgaagactggatgcgccgcatgctgctgcgcgacaaccgcatcgccgacgccagtgtgatcggcaacctcgagcgcaacgcttcgttctttgcctccagcacgctgatcatcctcgccggcattctcacggtgttgggtgcttcagagcgggcagtgtcgttgctggcggacataccgatggtgcaacaggcgtcccaaggtatgtcggagatcaagctgctgtgcctggcactggtgttcgtctatgcgttctttacattcagttggtgcatgcgccagtacaacttcgcggcggtgctggtcggctcggcgccgatgatcggcgagcgggatgtgtcggagcaggagcgcaaggcatttgctctacgtgcggcgcgagtcatctccatggcggccaaccagttcaactttggcctgcgttcttattacttcggcatgaccatgctggcgtggtttgtcagcccctggctattcatgttgatgagcgctggggtagtgttggtgctgtatcggcgggagtttcattccgacgtgctgcaagtgatggtgtttacccagacggatacaccgccgtcggaaccggttaaagaagcggtttgatcaacccctcaagtaaaaaacgccaggcaaagtaaagcccgctatctaagcgggctttctttttgcagcgaagctacttcaaaccgcggtctcaagaaccggtagcaggtgctgcttcttttgcggcggcttggttcgattcagcctgagctttggcagcttcggcgttttctttcgcagcgtcgttcactttatcctgagccttggccatatctttctgagcttgctcagaatgggctgcagcgtcttgggctttgtcttcggatttcttgtcgcaggcagccagaccgagggcagcggccagcatcatggaaatagctaaagtcttgcgcatgggtgtttctccttattgaagatatctactggcctttcgagcatggcggttcggcattagttccttttattcggtagatatataaatcgctgactaacaggaacttttgccctggcgaccattctgcggatcaacactaataagagtctggaacgaatgagcgaaaatcccctgttagagcgtgcgaagcgctttgtatcggccttgcgccactgtcaggtgctgggcattaccgctcatcaggccagcgaggagggcatcacgctgatcatgccgtatgcgccccatctggtcggcgatccccaatcgggggtgattcacggtggcgcgctgacctccctgatggacaccgcctgcggcatggccaccctgtgcgtattgccggaattcgaggtgtgcccgaccctcgacctgcgcgtcgactacatgcatcctgccaccccacacaaaccggtgtacggcttcgcccaatgctaccgggtgaccaccgacgtgatcttcacccgaggcttcgcctaccaggatgacccgcagcaacccatcgcccatgtcgtcggtacattcatgcgcatgggcaaacgcctcaagggcgcacaaggactgggcagcacgatcaagggagagcaggcatgacgcaccgattcaagacccgcctggagcaggcccacgggcgcggcgattacgcagcgctgctcaacctgatcccctatgccaagttgatcggcatcgaatgcacccggctgggagatgagctgctgtttcgcctgccggccaacaaggacaatattggtaacccgatattgccggcgctgcacggcggggtgatcgcgggtttcatggaactgtcggcggcgctgcacctgctggtgttcaccggcgcaccgggcatcccgaaaatcatcgatttctccctggattacctgcgcgccggtcaatttcgcgacacttacgccaaatgccaggtatggcgccagggccggcgagtggcgaacgtggcgatcaccgcctggcagagcacggcggcagagcccatcgccacggcccgcgcgcattttaagatcgaggaaccaggccacccttgaaatcctgctcttagcccccaactttgatgacaacccgccgccaaccctctagggcgcggccactgccatccaattggagtttgatgaccatgagtgtggaaactcaaaaggaaaccctgggcttccagaccgaggtgaagcaactgctgcacctcatgatccattcgctgtattccaacaaggaaatcttccttcgcgaattgatctcgaacgcctctgacgctgtcgacaaattacgtttcgaagccctgtccaagcctgagttgctggaaggtggcgccgaactgaaaattcgtgtgagcttcgacaaggacgccaagaccgtcacgatcgaagacaacggtatcggcatgagccgtgacgatgcgatcgcccacctgggcaccatcgccaagtccggcaccgccgatttcatgaaaaacctctcgggcgaccagaagaaagattcgcacctgatcggtcaattcggcgtgggcttctattcggcctttatcgttgccgaccaggttgaagtgttcagccgccgtgccggcctcgacgccagcgaaggcgtgcactggtcttccaaaggcgagggcgaattcgagatcgccaccgtcgacaaggctgaccgtggcacccgtatcgtgctgcacctgaagtccggtgaagacgaattcgccgatggctggcgcctgcgcaatatcgtcaagaagtactccgaccacatcgccctgccgatcgaactgccgaaagaacaagcggcagccgaaggcgaagacgcgcctgcccaggaatgggaagtggtcaaccgcgccagcgcgctgtggacccgtccgcgtaccgagatcaaggacgaggaataccaggagttctacaagcacatcggtcatgactacgaaaacccactgagctggagccacaacaaggtcgaaggcaagctggaatacagctcgctgctctacgtgcctgcccgtgctccgttcgacctgtaccagcgtgaagcgccaaaaggcctgaaactctacgtacagcgcgtgttcgtgatggaccaggcggaatcgttcctgccgctgtacctgcgcttcatcaagggtgtggtcgactccaacgacctgtcgctgaacgtgtcgcgggaaatcctgcagaaagacccgatcatcgattccatgaagtcggcgctgaccaaacgcgtgctcgacatgctggaaaaactggcgaagaacgagcctgagcaatacaagggcttctggaaaaacttcggccaggtcatgaaagaaggcccggcggaagatttcgccaacaaggaaaaaatcgccggcctgctgcgttttgcctcgacgcatgaagagggtggcgagcaggtggtttctctggccgagtacctggcccgcgccaaggaaggtcaggacaagatctactacctcaccggcgaaacctacgcccaggtcaagaacagcccgcacctggaagtcttccgcaagaaaggcattgaagtgctgctgctgaccgaccgtatcgatgagtggctgatgagctacctcaacgagttcgacggcaaatccttcgtcgacgtggcccgtggtgacctggacctgggtaacctggactccgaagaagagaagaaagaagccgaagaagtcgccaagtccaaagaaggcctggtcgagcggatcaaggcttccctgggcgaggctgtcagcgaagtgcgcgtgtcgcaccgcctgaccgactccccggcgatcctggccattggcgagcaggacctgggcatgcagatgcgccagatcctcgaagccagcgggcagaaggttccggactccaagccgatcttcgagttcaacccggctcacccgctgatcgagaaactcgacggtgagcagagcgaagagcggtttggcgacctgtcgcacatcctcttcgaccaggcggccctggccgccggcgacagcctgaaagacccggccgcctatgtgcgccgcctgaacaagctgttggttgaactgtcggtttgaccctgacgtagaaaaacccgcttcggcgggttttttcgttctaacgcacctcaactggagtaaatgatgagccaagtcactgtacgttccgtggtctatcagattgatggccagtcctacgaaagccgcctggcgttcgatgccagccacaagggcccgttgccggggttgttgatggcgccgaactggatgggggtgagtgcgggtgccgaagagatcgccaaaagtgtggccggccagggctacgtggtactgatcgccgacctgtacgggcagaccgtacgcccgtcgaatggcgatgaagccggtgcggcgatgatgccgctgaagaatgacaacccgaagctgctcaaactcatgcaagcggcgtttgagcaactgcagggccaggccgaggtggatacctcgaagcttgcgaccttcggcttctgctttggcggcttctgctcgctggagctggcacgtaccggtgcaccattgaaggcggccgtctcgttccacggcaccattgacacccagaacccggacggcgccaagcatatcaagggttcagtattggtcctgcacggtgcttccgacccattggtgccgaaggcgcaactgccggcattcgaagatgaaatgaacgcggccggcgtggattggcaattgctgagctatggcggcgcggtgcattccttcactgacccccatgcgaatgtgccgggcaagatgatgtacgacgccaagaccgccaagcgcgcgttccagtcgatgcacaacttgctggatgaggtgttcaagggctgattcttcagcgcctgtccgggcctaatcgggggcaagccccctcccacacttggatgcaatcactgatcaaatgtgggagggggcttgccctcgatggctatctcactggcaactcaatcctttcagactcccccggcaccgtcggccactccccggccgcccacctctgcctggcctgctcgatcaccgcggggtcactcgcgacaaaattccaattgatccgccgtggcccatcaagcggcgcgccgccaaacaccaccaagtggcaatcactgtccgcaaacaatgtcatctcctgcccggccggcaataccactaggctgtggacttcaagcgcctcgccgtccaactgaccgtcaccttccagtacatacacggcccgttcctcatgctcatcaggcaacagtagggttgtagccgtctgcatccgcacctcggcatacaaggtgggcgacagcaccggcaccggtgacttgaggcagaacccgttgcccgcgatcaggcgtatctgcacgcccaggttgtcactcaccggcaggctcgccgccgggtgatggctgtaatgccccggccccgtctcgtggtctttgggtgacgccaaccatacttgcagcccatgcaggctgaacccgctggccttgagcgcctcgggtgtgcgttcgacgtgggcaatcgcgctgccggcggtcatccagctcacatcacccacctgcaccacctggtccgagcccaggctgtccttgtgctgcaatgcgccctcaaacagatacgtgagggtcgacagcccgatatgcgggtgttggcggatattcatgccgtgacccggcgcgtagcgggtcagcagcatatggtcgaaaaacacaaaaggcccgacgctgcggcattcccgcgacggcagcgggcgcaggatcggttggccttcgacgtcttcggggcgagggcggatcacggtgagggtggtcatggtgcgtcccagtctgagcgggttggatgctgctgagcataacccgctccacgggaggttgccgctattggctgaaggcgccttccgacagtttggtgtcgatgctgatctcggcggtggtcatcagcttgtgcaccgggcagcgatctgccacgcggtgcagctcatcgcgctgttcgtcggtgagcacgcccttgagggtgagcttgacgttgagtgtgtatttgcccttttgctcttcggcggcgtcatgggtgacctccacggtcacgccggtgagggggataccttttttctgggcgtagagcttgagggtcagggctttgcacgaggccagggcggcgtcgaagtagtcatggggggagggcgccgaatcgtcgccgccgaggctcttgggcaggtcggtgaacaactcatggttgtcgatgttgaggctgtggcgaaagttgtcctggttcagggtgtttacggtaacaggcatggcaaacctcacagggtggcaggatgaaggtcatgcagttatagagcatgctggcacttcgatgttccgcgttttttgccggatgaaccctggcaaggcgttcaaggtctacccgtatcagcccctatcgaggtgttaccgtgccctggactcgcctgacccttgccctgttgttcgcctccggcagccttgccgcgcaggcccgcgactatgcctacagcgatgcgcacctgcattacgtggatttcttccaggaaactgcaggcatggacaagctgctcaaggccatggccgacaatcgcatcgaacacgtgatgatttccggtattccggtcgcgaagaaatggcacgaggacgaacccaagcgcccgcgctattacgccggtgacgacgccgatgcctattggtacagcgccaccgacgtgatcgtggccgcagcggtcaacaaactgacccctgagcagcgcgagcattttcatccgttcctgtccggcttcaaccccaacgacaagaactcggacgcccatatccagcgcatgctcgatctcaacccaggcctgtggcagggcatcggcgaggtttttacccgtcatgacgacctcacggccatcaccgccggcgacacaccacgggccaataacgaagccatgacccgcatttatcacctggcggcggaaaatgacctgccggtgatgctgcactccaatatcacctccaagcgcgagcgcaacccgctgtacctggctgaagtcgaagagccactgcgcaaccacccacacacccgttttatctgggcccatggcggcaccagcaaggaaatccaccgtcaccaggtgcagatggactttttgctgcccaccttgagccgcatgctggaggcgtaccccaacctgtacatcgacctgtcctggagcatgcttacgccgtatttgctggatgatagaggccatcctcgtccggagtggataacgctggtggagcgtttcccggagcggttcatgctgggctcggacgtcgtcgggcgtttcaacaagctgggtaaggaaatgcgtcgcttcgagcctttcctcgatgcactgcctgaggacgttgcgcacaaagtggcacgcgacaatttcctggccatcctgcctaaagcccatcgcgatggggcgccacgctgatatcgcgttttgatcttacgcaaaccccagattgcgccgatacctttcaatagccagctgcaattggatgcagcgctggtgattgccagcgcatcggagcagtagacgtcgacaggcgcgaaccagagcagtgcggcgagccaggagttgtcgcggttggcggtggacctgaacacgatggtggcgcggttttcggtgtaggggcgggcgccgaggcggcgctatcgggggcaagccccctcccacctttgatttgtgagtgcattcaaaatgtgggagggggcttgcccccgatgaggccctcccagccactaaaaaatccagcccataaaaaagccccgaaccagtcggggctttttaatgcggtcaagctacaggtcttactgaccctgccagcgtttcagcaccagggtggcgttggtgccaccgaagccgaagctgttgctcatcacggtgtcgatttttgcattctcaacggtcttggtcaggatcggcatatcagccacaaccggatcaatctcatcgatgttggcggagccggccatgaagttgccttccatcatcagcaggcagtagatcgcttcgtgaacgccagcggcgcccagggagtgaccggacaggctcttggtagagctgatggccggggccttgtcgccgaataccgcacgcacgccttccatttccttggcatcgccgaccggagtcgaggtgccgtgggtgttcaggtagtcgattggggtgtccacggtggacatggccatctgcatgcaacggatggcgccttcaccgcttggggcaaccatgtcgtagccgtcggaggtcgcgccgtagccgacgatttccgcgtagatcttggcgccacgggccagagcgtgctccagctcctcgaccaccaccatgccgccaccgccggcaatgacgaaaccgtcacgcttggcgtcgtaggcgcgggaggccttttccggggtttcgttgtactgggtggacagtgcacccatggcgtcgaacaggaacgactggctccaatgctcttcttcaccgccgccggcgaacacgatgtcctgcttgcccagctggatctgctccacggcagtcccgatgcagtgagcactggtggcgcatgcggaggagatcgagtagttcacgcccttgatctggaacggcgtggccagacaggccgaaacggtgctgcccatggtccgtgtgacacggtacgggccaacgcgcttcacgcctttttcgcgcaggatgtccagcgcttccatctggttgagggtcgatgcgccgccggagccggcgatcaggccggtgcgtacgttcgatacctggtcttcgctcaggccggagtcggcgatcgcgtctttcatcgccaggtaggcgtaggcggcagcgtggccgacgaagcgatagatcttgcgatcgatcagttcttcgaggggcaggtcgatggagccggaaacctggctacgcagacccatttcggcatattccgggttgaagcggatgccagggcgacttgcacgcaggttagcggtgacggtctctttgtcattgcccaggcaagaaacaatgcccagaccagtgataacgacgcggcgcatgcggataacccttaaaagttgtcagtggaagtgaatacgccgacccgaaggccttcggcagtatagatctcgcgaccgtcgacgctcaccgaaccatcggcgatggccaggttcagcttgcccttgaggacgcgcttgatctgaatgttgtaggtgactttcttggcggtcggcaggacctggccaaagaacttcacttcgcccgaacccagggcgcgaccgcgacccggcaggccttgccagcccaggaagaaaccgaccagctgccacatggcgtcaaggcccaggcagcccggcatcacagggtcgccttcgaaatggcaggcgaagaaccacaggtccggggtgatatccagctcggcgaccaattcacctttgccgtacttgccaccctcttcgctgatatgggtgatgcgatccaccatcagcatgttcggggcgggcagttgcgcgttacctgggccgaacagctcaccgcgactgcagcgcagcaggtcttcccgagtaaaggcgttttgtttggtcatgcgagctcctcaataatcccatgcggcagggtagggcaaatcttcccgaaccgaatgaagcgttcatgcctcatgtcggcagcctacacgtagactattgcgttgtagtgaaagtcacagcggcaaggcactgaatgtacacttgttcactgaaattttaaaccgggcctgtttataggcccgttcgggtgcctaagactgccgcactttcgtctttcacgccagtcggagttggctgatggcgcggcgctattgcacccagcgctgcaggatttgctgcaaatccgtgcgtttgaacggcttggccaggtaatcgttcattccggctgccaggcaggcttcacggtcgccctgcaacgcgttggcagtcagggcgatgatcggcaggtcggcgcagccgggcagttggcggatcttgcgggtggcctcgtagccgtcgatcagcggcagccggcaatccatcaggatcgcggtgaaaatcaggctctcggcactgcggatcgcctcggcaccgtcggtggccaggctcacttcaaagccgaggctgcgcaacatggcttcgaccacggtgcggttgaccgggttgtcctctaccagcaatacatggcggccatcgccggcgttggctttgccgtcggcgccttgcgcgatggccggtacgctctgctggtcgatggccaggggaatttccagggtaaataccgagccgcggccttcttcactttgcgcgcgcagggtgccgcccatgcgttcggccagggtacgggcgatgggcaggcccaggccggtgccgccgtaacgccttgaaatggaactgtcggcttgctggaacgcatcgaacatcaactccaggcgttcggcggaaatcccgatgccgctgtcgcgcacggtgcaggtgaaccacaccagttcatggtcgagggtctgccaatggggttcgacgctgacgctgccctgctcggtgaacttcagcgcgttgccgatcaggttcaccaggatctggcggattcgcgtcggatcgccctgcacgcgcaaagcgtccaaccctggtggaatcgacagtttcaacgccaacccgcgctgctgggcgctgtgctggaacgcctgggcgcagctgttgatcaggtccgccaggttgaacggaatatgctccagctccagggccgcgcgttcgatgcgcgagaagtcgaggatgtcgttgatgaccttgagcaagtgctcggtggattcggaggccagcgccgcgtactcggtctgctcctcggtcatctcggtggtttccagcaattgcaacatgcccagcacgccgttcatgggcgtgcgcagttcatggctcatcatcgccaggaaatccgacttggcgttgttggcgcgctcggcctcttcgcgggtctggatcaactgggccatggcctgctgctgttcgcggctggcctggttgaggccttcggccaggttattgatgtgtcgcgacaggtcgcccaattccgagtcgtccacgatcggcaacggcgtcttgtagtcaccttgctggatggcttttacggcgtggcccatggcgctgatcggctgcgacaggctggcggccaggcgccgcgcgagcaggaaggtaaacagcagggcgaacagcgccaggatgccggccttgaacaggatctcctgctggcgctggctgaatgcgtcgttggacatgccgacgatcacccggcccaggtagtcggcccgcggtgctttgggttcgttgaggttgtcctggaaaaaatcattgcccaactggatgtgttgcaggcgaatcggtgcctggaacactttcaccgacagcgaacggtcgtgtttttccgacggttgctcgacatacaccaggatgttctcgctgctgtcctggatctccaggaaccgcacatggggcgtagcgagcgtggcgcgcagcaggctgtcgagcacttcgttgttgccggagatcaccccgtactcggtggcgggcgccagttggttggcgatcaactggccggtgtggtccagttcctggcgcaagtcctggatccgcacgaaggtgaaaaagctgatcaacagcaacgtcagcaacagcgccgggcccagggtgatgagctgggtgcgggtgttgatgtcccaacgacggcgcaaggtcatgggcgtttttctccttcggccaagcggatcgcgacgccggcttcgtccacctgttcgatccccagtgagcgcgcgacttgcgggttgcccacgactttgaagtgttccgggtacagcgagcgcggccagttggccggcgggtggtcgagcagacggtctagcacggccagccagtcggcctggtcgctgtaggtactggccaggctgccggcccgcacaaagcctgcattcgggcccaccagcggcaattgctgggcatagctgctcagcaacaggttcttcgcggttttcgggttgtacaactgcgggtcatcgaggccgagcagcacgtcactgttcctgaacaggttttgcagcgggcggctgtcattaatgttgtcccagagctgtggcacgatttccaggccgagcggtgtggcgtgttggcgcagttcgggcagcaggaactcactgtcggcgccatacagcacgccgatgcgccgcgcctggggcaggatggcggcgatcaggcgcagttggcgctccagcggtgggtcgctccacagtaggctgatgtgcgggtgaggtgtgctgcccaggcgttgatgggcctgtaaccgactgatacgcagcaccagggtcggcgggccctgggtttcctgcaggcgccagtcgaggccgggcaggtcgagcaggatcaggcgtgtgttggccggcagtcgaccaggggctggcaagtttttgagtggtgtgaaggtgacgcggtcttcggggcgttgctgggccagggcttgggcgaaggcctgcacgccgacgccgtcttcggcggcggtcaacaggatctcggcactccaggccggcgcggcaaacagcaggcacgcgagcagcagaatgcgtcgccagagcgtgtggataaaaaagcaggtcatccgtgacgagtcgcccatgtcagaactctagctccgcgctgaagtagagcacatggcgatggtcataattgttatcggcccaggtggtgggctggtgatcaaggcgttgttgcaacatgccggccagctccacgttggctttgcccagggcaatgcgcttggccacccgcaggtcgacccgttcgaagcgatattggttgagtgcgtcatcgccgtagtagaacaacgcgctggaccagccttggccccattcgcgcaaccaaccggcagagccactgttgcgcgcggtctgtgctttgtcccgcgggttgctgctggtggcatcgacgtaagcataggtcagccgcaggcggtcggcgttgctcacgcgccagtcgaactgggattcggcgccggtgaagcgtgcgctgttggcgttgctggcaatgtactggttattgcgcagcggcgaactgatcatgtcggtgatttcgtcgtagaacagtttcacgtccatgttcagcccgatgtcggcaaagaagccgttgtaccccaattcccgcgacttcatcatctctttatcgaggttgcccggcccccgcgtctttacgaagtattgcccggtggtctgaccgtaggccggggagctgaggttggtgacgcgataactccagttgacgttgttctcgaacatgtccggcgagcggatggcttcggagtacaccgcgcgcaagccatggcgcgggttgatcaggtagttgaccgccacccgtggcgtgagcgagttgccgctcaggtgcgtgtcctcatacatggcgccgccttgcagcagccaatgttcgctggcgcgccattccaactggccgaacaggcgccaggtggtgtcgtccagggtgccgttgaagtaggtgtcggagtcggcgcggtcgtagcggtaattcatgccgctgaccaggcgcaggctgtcggagaggctgagggtatcctggatttccagatcgtagcggctttcgcgggtgctctggtcgatgtctccgcacacgctctggttggcgccgttacgccattggtccagcacctggttggccagcgcttgctcggcggcgctgcccggtggcgcggtgccttggctgtaggtgtccatgtgccgggccagcagttcggcgtagttggggttcatctgccacagttgggtcaattccgggctgaacgacactttggcgtcgcaggccttccagatttggcggcggtcccactgctgggccgagccctggatgtacaggctgtgctcggggttgaaatcaaaattccagcgcagcgagccggcgtagtccttggccgtgacgtcggagttgttgccaccttcggtaatcccggcgaataccgggctgtaggtatacggacgttggttggtgccttccttcgcatccagttgccagtcgatgctctgctgcgcgttcaacgtctggctaactgccaggctgaagcggttgaggcgccgcccgtcgcggcggtcggcgccagcggcgtcgctgtcgaagccatcgtcctgctggccggacagcgacaggcgcaaatcgccggtttcccagccgacgccctggctggcatagaagtcgttgatgccacgttcgccacgcaccaccttgacccgcgtaccgtggctgttggcgggcgagcgcgtgaggatgttgaccaccgccatcaaggcattggcgccgtagctgacggtgttggggccgcggaacacttcgatgcgctcgatatcttccatggccaccggaatgtcgctccagtccacggtggccaggcccgcacggtacaccgagcggccgtcgatcagcacctgcatgcgccgcgcatcgctggcgctggtgccgtggtagttcaccgccgcctggttgccggaggtgtagccgaccatcatccccggcaccaggcgcagcaactcgctgatatcccgcgcgccgctggccttgatcagctcgctgtcgatcacggtcatgctgccgggcacggcggcggccgattgcttgaggcgtgtggcggtcaacacctggggcaatggctggctgtcgaggaacaggtcgtcggccatgacaggcgcactgcacagcagcatcaaccacagagatgaacggggaggagggcccaaatacacggcacggccttgataattacggatagccgcccatgttaactgaggtggggccatttgccagtcgcaggacttgcaattacttcatgtaagtgtggcattttccgacaagcgcacgaattgatacgggggctggccgccggcgggtcggcccgtataatgccgccatcgccactggtatggattaacggattgcatatgactgaacagcgccctatcgcggtcctgggaggcggaagttttggtaccgccgtggctaacctgctggccgagaatggtcacgctgtgcgccagtggatgcgcgatcccgaacaggccgaggccattcgggtgcaccgggaaaatccgcgttacctcaaaggcatcaagattcatccggcggtcgagccggtcactgacctgctggaaaccctcacggcctgcgacctgtgcttcgtcgcgctgccgtccagcgccttgcgctcggtgctggcgccccacgccgaacgcctggcgggcaagctgctggtcagcctgaccaagggcatcgaggcgcagaccttcaagctgatgagcgaaatcctcgaagagatcgccccccaggcgcgtattggcgtgctgtccgggccgaacctggcgcgggaagtggccgagcacgcactgaccgccaccgtagtcgccagtgaagacgaagaactctgcgaacgggtccaggccgtgttgcacggtcgtaccttccgggtctacgccagcagcgaccgctttggcgtcgagctgggcggtgcgctgaaaaacgtctacgcgatcatcgccggcatggccgtggcgctgggcatgggcgagaacaccaaaagcatgttgatcacccgcgccctggccgagatgacccgctttgcggtgaaccagggcgccaacccgatgaccttcctcgggctggcgggcgtgggcgacctgatcgtcacgtgctcctcgccgaaaagtcgcaactatcaagtcgggttcgccctgggccagggcctgagccttgaggatgcagtcacgcgcctgggcgaagtggccgagggcgtcaataccctcaaggtgctcaaggccaaggcccaggaagctggcgtgtacatgccgttggtcgccgggctgcacgcgatcctgtttgaagggcgcaccttgaaccaggtcatcgagttgctgatgcgcgccgagcccaagaccgatgtcgactttatttccaccagtggtttcaactgaggaacgcgtcatgaacgatccgaaagcagcccccaagtacgaatccattgccctgcgcatcctgtggatgctggtgtttgccctggtttggcaagtggcgcagttcctgctcggcgcgctggtggtggtgcaactgatctaccgcctggtctacggcgccccgaacctgggcctgatgaacttcggcgacagcctcagccagttcctggcgcagatcggccgtttcggcagcttccataccgagcaaaagccgtggccgtttgctgactggccgaccccgcttgcgcctgagggcgaagccgcccacagcgtgccgccggcaccgcacccggtgcgtgatgaagagccgaaactgtgaagttgtggatactgcgccacggcgaggccgaagggcatgcgcgcaccgatgccgaacgcaacctcaccgagcacggccgtggcgaagtgttgcgcagtgctgcgcacctgatcggccagcccctcagcgcgatcatcgccagcccttacgtacgggcgcagcagaccgcgcacctggtgcgtgatgcgttgggcttcgagccggagatccgcacggtgccgtggctgacccccgatggcaacccgttgaaggtgctggaaaaactcgacaccgacgacaatgtgctgctggtcagccatcagcctctggtcggcagcctgatcagcttcctgcagcacggccaccagcgccagccgcagccgatgtacaccgctagcctggcggaactagagggggatttcccgctggcggggctgatgagcctggtcagcgtgaagaatccgtaggctttatcgctgctttgtgtgtgctatatagtcaaccaagcaagtgcttggttggctatcgtcggaccacaaaggagcgcgtcccatgcccgtcgcatttcgattgccgttgcaggtgtttttcgaacgtgaagcgcggcacccgcgccagacctttctggtgcagcccattggcggcggcgaggtgcaacgcctcacttggggcgaagccggccatcaggcccgttgcgccgcgcactggctgcgcgcccgagagctgcccccaggctcgcacattgccctgatctcgaaaaactgcgcgcactggatcattgccgacctggcgatctggatggccgggcatgtctcggtgccgctgtatcccaacctcactgccgactccgtggcgcatgtgctcagccattccgaggcggcgctgacgtttatcggcaagctcgacgactggcccgccatggggcccggcgtgccgtccaatgtcccgaccatcagcttgccgctgtgcccaaccggcgcgttcgatttcagttgggccgacctgcagggctgttcgccgatccaggacgacccgctgccggccgctacggacctggccaccattatctatacctccggcaccaccggcctgcccaagggcgtgatgcacagcttcggcgcgctggggtttgccgccacccgtggcaccgagttgttcgggttgggggagggcgaccgcctgttgtcctacctgccgctgtgccatgtggccgagcgcatgtttgtggaaatggcggcgatctacaccgggcagacggtgtttttcgccgaaagcctggagacgtttctgaccgacctgcgcagggcgcggccgaccgcgctgtttggcgtaccgcgtatctggaccaaattccagatgggcgtctacgccaaaatctcggcaaaacgcctcgataccctgctgcgcctgcccttcatcggcaagcgcgtgggccgcaaggtgctcgccggcctgggcctggatgcgttgcgcatcgcgctgtccggggcggcgccggtgcccgaggcgctgctgcgctggtatcaacgcctgggcctggacgtgcttgaggtgtatggcatgaccgagagttgcggttactcccatgtgtgtcgccccggccagcagaccctcggctggatcggcctgccgtgccccggtgttgaggtgcgcatcgatcctgcgggcgaagtgcaagtgcgcagcggtgcgaccatgctcggctactacaaggacccgctgaaaaccgccgagacgatcaccgccgacggcttcctgcgcaccggtgacaagggcgagcaggctgccgacggccggctgcgcctgaccggacgcctcaaggagatcttcaagaccagcaaaggcaagtacgtggccccggcgccgattgagaaccgcctgtccgaacatgcgcgcatcgaacaggtgtgcgtggtgggcgatggcctgaccgcaccgatggggctgtgcgtgttgtcggcaatcagtgaggacccgcatgcgctgcgcagcagccttgaacgctggctggagcaggtcaatcaagcattggacaaacatgaacgcctgcgccagttagtggtggtgaaagacaactgggcggtggaaaacggcttcttgaccccgacgttcaagatcaaacgcaacgtgatcgaatcgacctacggtgaacatttccagacgtggagcgagcgttccgaaaccgttctgtggcaggattagggccatcataaaaccaacaaggacatccgcatgagcctgtggcgcacgcaaccgaacatcgaccaactcaatgcgatccagaaaaacaccattggtgaactgctggatatccgttttgaacgcttcgacgacgaatcgctgaccgccagcatggtggtcgaccatcgtacccaccagccctacggcttgttgcatggcggcgcatcggtggtcctcgccgagagcgtcggctccatggccgcctacctgtgtatcgatgcgagcaagttctattgcgtgggcctggagatcaatgccaaccacctgcgcggcgtgcgcagcgggcgggtgacggcagtggccagggcgatccatatcggccgcaccacccaggtgtgggacattcgcctgaccagcgacgacggcaaggccaattgcgtgtcgcgcctgaccatggcggtggtgccgctgggcgagaacccgccggcgcgataggcgtggcgtgagtgtcatcattcctggcagttacagtcattgctgtggcggtcggggctggtgacaatcaatctctgtttttgtcgatggatccggtatgtcgcagcatgtgtttttcgcccacgccaatggtttcccctcggccacctacggcaagctgtttgccgccctggccccggaatatgcagtggcgcacttgccgcagcacggccacgaccccaggtttccggtggacgataactggcagaacctggtggatgagctgatccaccacttggagcagcagccggaaccggtgtggggcgtggggcattccctcggtggcgtgttgcatctgcacgcggccatgcgttgcccgcagttgtatcgcggggtggtcatgctcgattcgccggtgctgacccgcgccgaccgctgggtgatccgcgcggccaagcgcttcggttttatcgatcgcctgaccccggccggccgtaccctgggccgtcgcgaggagttcagcgacctggaagcggcacgccgttacttcgccggcaagaccctgtttcgtggctttgatcccgaatgcttcgatgcctacctgcaacatggcctgcagcaagtgggcgatcgcctgcgcctgcgcttcgacccggccaccgaaatcagcatctaccggggcgtgcctcacaccagtcccggccaggtgcgccagatgaaggtgccgttggcggtggtgcgcggccgccagagccgggtggtgatgcgtcaccacgccagcggcgtcggtcgcctgcccctgggcgaaatgctcaccatgcccggcggccacatgttccctcttgaacgcccccaggacaccgcgaccttgatcaagagcctgttttcccgctgggaagcccgcgagcgcagttgcgcatgagcacaccggtcgaagaagtgcgcctgagcctgccgcatatcgaattggcggcccatctgttcgggcccgaggacggtttgccggtgatcgcgctgcatggctggctggacaacgccaacagctttgcgcggctggcgccgaaacttcaggggttgcgcatcgttgcactggacatggccgggcatgggcattcggcgcatcgtcctatcggcgccggttacgccttgtgggattacgtgtacgacgtgctgcaagtcgccgaacagctgggatggaaacgttttgcattacttggccactccctcggcgccatcgtttccctggtattggccggtgcgctgccggagcgcgtgacgcacctcggattgatcgacggggtgatcccgccgaccgccagcggtgaccacgccgccgagcggctgggcatggcgttgcaggcgcaattgaacctgcaggacaagcgcaagccggtctacaacaccctggatcgagcggttgaggcgcgcatgaaaggtgtggtggcggtcagtcgcgaagccgccgaactgctggcccagcgcggtctgatgccggtgccgggcggttacacctggcgcaccgacagccgcctgaccctggcttcgccgatgcgtctgaccgatgagcaggcgatggctttcgtgcggcgtgtgggctgtcctacacagttggtggtggccgcagacggcatgctggcgaaacattccgaattgctttcccagctaccctttaccgtcaccacgctgccgggaggtcatcatttacacctgaatgacgagcccggcgcggtccttgttgcagactgtttcaatcggttcttctgcgcgccttgacttggggcggtcaactgccgaggctgggcggattgaaagggagtcaaccatgaactacttcaacaccgctgtgacctccgatggccagggctcgttgatcttatgagcgtgcgtaacggatgtatccgtatcctgggcttgagccttctgagcccactggtatttgccgccgacgtaccgggtagccaggacctgcccaccgtggcccgccaggtcgacgcgcaaatcgtcgactaccgtcccgccgaagaaaaagaacgcatctaccccatgggcgccatccgcaagatcagcggccagttgcgttatgaaggccaggccaccgcgcggggccaagccactgccattacctatgagttacctgccgaacacagttccagtgccgcatttactgcgacgcgcgaagcgctgcaggcgaagggcgcgcagttgctgttctggtgccaggcccgggattgcggcgaaagcagcctgtgggctaatgaagtgttcggcaacgccaagttggtcggtgccgacggccagcaggaatacctgctgctgcgcctggcagccccccaggaaaactccctggtggcgctgtatggcatcacccgtggcaaccgccgcgcctatctgcatgtggagcaactggacgccaacgcgccgctggccgacctgctgcccacctccgcgacactgctgcgtgagttgaaaagcaccggcgagctggactttcccgcactgggcggcgagcctgacgacacctggttgaccctgatttcccgtgggttgaatctagataccaccttgcgcgtcagccttaccggcccgaacgccgaagcctggcgccaggccctggtcgacaaaggtgtgcgcgccgcgcgcctggaaaccggctccgctgaaaccaaaggcctgcacctgcatctgatacgctgaccgttacaaggcgaacggacccgcgccgttcgcctaagctctcttcctacagccttcttctagagatactccatgctcaataacgatcgcctactggtgcaaatcctgctgctggtgctgttcggtgccagtttctgggtgatggcgccgttctggtcggcgctgttctggggcgcggtactggcctttgccagttggccgttgatggtcctgctcacccgctggctgggtggtcgcgaatccctggccgccggcatcctgacgttgggttggatgctgctggtggcgctgcccctggtgtggctgggcttcaacctcgcggatcacgtgcgcgatgcgacggcgttgatcaaggatatccaggttgacggcctgccggaggcacctgcctggctcggctcgatccccttagtcggtgagcggctggtggccatgtgggacagcattgaccaacagggcgcggccttgatggtcagcatcaagccctacctggggcaggtcggcaattggttgttggcgcgcagtgcgcaaatcggtggtgggattctagaactgaccctgagcctggtcttcgtgttctttttctaccgggacgggccgcgcctggcgatgtttgttcaccgcctgctggagcgcttgatcggcgagcgtgccggctattacatcgaactggtggccggcaccgtgcagcgcgtggtcaacggcgtgatcggcaccgccgccgcccaggccctgttggcgctgatcggtttcctgatcgccggggtgccgggtgcgctggtgctgggcatcgtcaccttcctgctcagcctgattcccatggggccgccactggtgtggatcccggccacggcgtggctggcctggaagggcgattacacctacgcggtgttcctcggcgtgtggggcacgttcatcatcagtggcgtggacaacgtgctcaagccttacctgatcagccgcggcggcaacctgccgttggtcattgtgctgctcggggtgttcggcggcttgattgcctttggtttcatcggcctgtttatcggcccgaccctgctggcggtggcctacagcctgttgatggattggagtgcgacccaggcccaggggcggcgggaagacaagccgctctagacgcgtggcaaccacatcacggctgtcaaaccacccccgggggtttcttccaggtgcaaccgaccgccgaggcgttccgccgcttccttggaaatcgtcatgcccaggccgaccccgccggagttgcggttgcgtgagccttccaggcgatagaacggttcgaacaccgcctcgcgctggtcggcggcaatcccggggccatggtcgatcacccggatgaccagcgcttcgcggctgtccgccagttcgatgcgtgccgagccggcgtagcgcagggcgttgtcgatcaggttgttgaggcatgatcgcaacgccatcggttgcacttgcagcggtgcgcaggtcccgccgaactgcacatcggcgccctggtcctgggcgttttcgctcatggactcgaccagcgcctgcacgtccagccaatgccgggtttcgctggtgcgttgttcgtgcaggtagctcagggtagcgtcgagcatgccgatcatgtcgtccaggtcctggcgcatctggccttgcagccgggtgtcttcgatctgttccaggcgcagtttcaggcgtgacaacggggtgcgcaggtcatgggagacggccccgagcatgcgcgcgcgttggctgacttgctcgcggatgcgtcgctgcatcaggttaaaggtcgacgccgcttgctgtgcctcacgcgggccagattcatcgaggggcgggctgtcgaggtccaggctcaggcgctcggcggcttcactcaggcgctggatcggccggctcagcagcttggcgccgtaccaggctgcgatgatcaacgagatgaactggaacgtcagtggcaccaccgggccaccaaaccacggtcgcttgtgcctgggcaggtgtttcatcgtgccgtccggctgctcgacaaaggtctcttgaggcggcggtggaggtgggccgtaatagcgaaaccaggaaatggccagcacatgagccagcacaattgccaccagcaacacgccaaacagtcgaccgaacagcgtgttgaaggcgttgcgcatcagccgatgtcccgggcgtcgaacaggtagccttcaccccgcacggtcttgatcaattgaggggccttggggtcatccccgagtttttgccgcaggcgcgacaccagcaagtcgatgctgcgatcaaaggcttcgatggagcggccacgggcggcatccagcagttgttcgcggctcaacacccggcgcggacgttcgatgaacacccacagcaggcggaattccgcattggacagcggcaccaccaggccatcgtcggccaccaattggcgcagcacactgttgaggcgccagttgtcgaagcggatattggcgcgctgttcggtacggtcgtcacgcacacggcgcaggatggtctggatgcgtgctaccagctcacgaggctcgaacggcttggacatatagtcgtcggcgcccagttccaggccgatgatgcggtcggtgggttcgcagcgagcggtgagcatcaggatcgggatatccgattccgcacgcaaccagcggcacagcgacaggccgtcttcgcccggcagcatcaggtcgagcaccaccacgtcgaaggtttcggcctgcatggcctggcgcatcgccgtaccgtcggtcactccgctggcgagaatgccgaagcgggccaggtagtcgatcagcagttcacggatcggcacgtcgtcgtcaacgatcagcgcgcgggtgttccagcgtttgtcgtcggcgatcaccgcgcctttttgctcgtcgttcatagagacggaaggggtatgcatcatgcgatcatctgcctggttgttgcggtcagcataggcgcccagccccatggctggaagtgctggtcggtgggtcgtgcgagcgaggctagccgtggggcgtgttgggggcatgtcgtgaatgtatcagctttgaaataattacctgaaatgcccacccgatggcgcttggtcagtatttaccgatcatcggatcccgcaacgccgtcgcttgcgctacaatccgcgccgatttcgacttgcctgagagcccattccaatgtccgtctgccagactcctatcatcgtcgccctggattaccccactcgtgacgccgcactgaagctggctgaccagttggacccgaagctgtgccgggtcaaggtcggcaaggaactgttcaccagttgcgcggcggaaatcgtcggtacgctgcgtgacaaaggttttgaagtattcctcgacctgaaattccacgatattccgaacaccaccgcgatggcggtcaaggccgccgccgaaatgggcgtgtggatggtcaacgtgcactgctccggcggcctgcgcatgatgagtgcctgccgtgaagtgctggaacagcgcagcggccctaaacctctgctgattggtgtgaccgtgctcaccagcatggagcgcgaagacctggccggtatcggcctggacatcgagccccaggagcaggtactgcgcctggccgccctggcgcaaaaagccggcctggatggcctggtgtgttcggcgctggaagcccaggccctgaaaaccgcgcacccgtcgctgcaactggtgaccccaggcattcgtccggcgggcagtgcccaggatgaccagcgccgtatcctgaccccgcgccaggcgttggatgcaggttccgattacctggtgatcggtcgcccgatcagccaggcggccgatccggccaaggcattggcggcagtcgtcgctgagattgcctgacacttgaaagcgaacacagtaaaaaatgtgggagggggcttgcccccgatgacgattgctcagccaaaaatgtagtggctgacccaccgctatcgggggcaagccccctcccacattttgctctgcggtgtgtcagctgaccttgagcaccaacttcccgaagttctcaccgttgaacaacttcatcagcgtttccgggaacgtctccagcccctccacgatatcttccttgctcttgagcttgccctgggccatccagccggccatttcctgcccggcagcggcaaagcctgcggcgtgatccatcaccacaaacccttccatgcgcgcgcgattgaccagcaatgacaagtagttggccggacctttcacggcttccttgttgttgtactggctgatggcgccgcagatcactacgcgcgccttcaatgccaggcggctgagcacggcgtcgaggatatcgccgccgacgttatcgaaatacacatccacgcccttggggcactcgcgcttgagtgcggcaggcacgtcttcgcttttgtaatcgatagcggcatcgaagcccagttcatctaccaggaacttgcacttgtcggcgccgccggcaatgcccaccacacggcagcccttgagcttggcgatctgcccggcaatgctgcccacggcaccggccgcgccggagatcactacggtttcgccggccttcggcgctccggtgtccagcagcgcgaagtaggcggtcatgccggtcatgccgagggccgagagataacggggcaggggcgccagttttggatcgaccttgtagaaaccacgcggctcgcccaggaagtaatcctgcacgcccagggcgccgttgacgtagtccccgaccgcgaatttcgggttgttcgaggcaatcactttgcccacgcccagcgcgcgcatcacttcaccgatgccgactggcgggatataggacttgccttcattcatccagccgcgcatggccgggtcgagggacaggtattcattgcgcaccagcacctggccgtcctggggcgtgcccaccgggacttcctgataggtgaaggtgtcccgggtggccgcgccgaccgggcgcttggcgagcaggaattggcggttggtctgggcgatcatggcagcgactcttctggaaatgaacctgaagtgatagaccctgaacgggccgggagcaaggttcaccgagcgtgcgaatgccggtcgataggtgttgctgatagtcaggtggcgcctcttatcactgtgatgcatgcagcttcaaccggccttttgatagtgctgacgcgcctggcgctgcgttggctagactcgatccacgactttccctcacaggacatcctcatgagcatgacgttttccggccaggtcgccctggtgaccggcgctgccgccggtatcggccgcgctaccgcactcgcgttcgccgccgaagggttgaaggtggtggtcgctgacctggacgttgcgggcggcgaaggcaccgtcgcactgatccaccaggctggcggcgaagcgctgttcgtgcgctgcaacgtcacgctggaagcggatgtgcagcaattgatggcccagaccctcgccgcctatggccgcctggactacgccttcaataatgccgggatcgagatcgagaagggcaagctggcggatgggaccctggacgagtttgacgccatcatgggcgtcaacgtcaaaggcgtgtggttgtgcatgaagcatcaattgccactgctgttggcccggggcggtggggcgatcgtcaacaccgcgtcggtcgcggggctgggcgcggcgccgaagatgagcatttatgccgcgtccaagcatgcggtgatcggcctgaccaagtcggcggccattgagtatgcgaagaagaacattcgcgtcaatgcggtctgcccggccgtgatcgataccgatatgttccggcgtgcctatgaagccgacccgcgcaaggccgaatttgccgccgccatgcacccggtcgggcgcatcggcaaggtcgaggaaatcgccagcgcggtgctgtacctgtgcagcgatggtgcggcctttactaccggtcacgccttggcagtggacggtggcgcgacggctatctaggaccgcaggtcgccctccattcgaaaaggtcatggagggtgtgaggtttttccatagctggcacggtgccttgtcagaatgtgtatcagtaggtaaataacttaataaaatcaatactttaataagaattggcgagcggccgacgtgggcttccgtgcttaactgtctcgggttgaattacagacagttgaagtgagtggcgcatggatttagggatcgatcgacaagcccttgtaccggtggtgcagcaaatcatcagcgcggtggcgcaatggattcgcacgagtggggcgagccctggtacacgcttaccctccgttcgccaggtggctctcgataacctgctcagccagtccagtgtgatcgaggcattcgagcggttggtcgcccagggcctgctggtttcgaaacagggctcgggtttcagcgtggcccagccaccgaccgtgcacgaaagccagtggtacgaaggtgccgagcgggattggggcgccttcgcggataccccgttgggtgagctgaaactgggttgcggctggctgccggatgcctggcgcgaaagcgatgacatcagctacgcgattcgcgaagtcacccgctgcgacacggctgcgctgttcaactacagcaccccattggggctcccggcgttgcgcgagcaattgctcaagcgcctgacccaggcgcacatccccagccaccttgacggcatcctcaccacggcgggcgccagccatgcacaggacctgctgatacgcaccttactcaaggccggtgattgcgtggtggtcgaaacgccggggtacggcaacctttatcggcaactggcattccatggtgtgcaactgctgcaggtgccacgcacccgtggcgggccggacatcccggcgcttgaagccttgcttcagcgttatcggcccaagtgcctgttcatccacagcctgtatcacaaccccaccggttcaagcctgagtcgcaccgtggcggagcgtgtgttggagctggcgcaccgcgagaactttttgattatcgaggaggacgtgttcggtgatctgcaacacgccagttgcacgcgactctcggcgttaccccacggtgaccgggtgatctacgtcgcaagcttttccaagaccctgagcagcgccttgcgcgtgggctatctcagcgccagcacggcgatcatcgcgcaattggccagcctcaagactttgaccggcttcggcacttcgcggtttgccgaggccgtggtggcgacactgctggcaaatggcacctatcgcaagtgggtacagcgtctgcgcaagcggctgagtgcgcaaatggccgcgaccttgcaggtgctggaggatgaggagtgggaggtgttcgccaaccctgccggcgggatgttcgtgtgggcgcggccaggggtgggggatcggtcgcggttgcaggcgtgtgcccggcggctgggggttttgttgtcgccgggggcactgttcagtccaacggatgagcccagtgagtggctgcgaatcaatgtggcctatgctgctgatcaacgggcactggcgttattccgcgccatgggacctgccagatcgacctcgaccattctgaaaacgacgggcgtgtagctttttgccattattgtggcgccaacgacttgtgttcggtgccttgtggttgccaatctcgcttgtgtaaaccgggcttgatggcatctgccattgcaagaggatgcaagtgcaatgatttcggccgtgcaacgacgcttcgccaacctcggtatggcaaaaaaactgggcttgggcttcaccctggtattgctgctgaccgccctggtcgcggcgatcggcgtgtggtccctgcaaactgttggtcagcgcttcgaaggcctcaaggccatgtcgtcgctcaacagcggcttgctcagggtacgcctgatcgagcaggactacgcgttgcatgccgaccccaaggccgtcgacgccctgcatgaaagtgtcgatgccttggccgccctcgcggcgagcctcaaggcccagtcggcggccaacgtgccggtcatgaccgatgtcgaacaggccctggccgcctaccgcaaggcgttcgatgagtttgtcgagctgacccagaccaaggacttggcgttggaaatggcaagttggtcagtgtccagcgtggccaataacctcgatgtgttgcaggccgggctggctgacgacggtgcctatggcctcaaggaaagccagggcaaggagggcgccgagtttatcgagcaggcggggcaggtcagccaggtttcacggctgatgctgcaagccatgaacgaagcccacgtacgtctggaccagagccgcaaggtggacgctgatgacgccgagcaaggcaagatcgagcaggccgaccaggcgctggcccaggttgaaacactgaaaaccgcggtcaaggaccccggttaccagacggtgttgaatgaggtctccgggcatattgcttcgttcagtgaaaaactcggtgaatacaccggcctgctggcccaggagaaggtggtctacaagcagttgcgtgatcgcgccgagcaagtggtcagccgggtcaaccaggcttacgacaccgaagacctgtcgatgcaggcgcagcttaagaaaagcgcgatgctgatcatcggctcttcggccttggcgctgttggtggggttgattgcggcctgggtgattacccgcctgatcgtcgcgccgctgcgcagcgtgattgcggtcgcccagcagattgctgccggcgatttgagtgggcgcatggacgtcagtcgccgcgatgaaatcggccaactgatgcatgcgatgcagcagatgggcaatggtctgagccagatggtcagcggcctgcaggccggtatcgagcaactggccagctcggcgcattcgttgtccagtgtcaccgaacaaaccaatgtcgaagtcagtagccagaaagaagaaaccgaacaggttgccacggcgatgaatcagatgaccgctaccgtgcacgacgtggcgcgcaacgccgaagaagccgcgcaagccgcacagacggcggacgacaaagtcgacagtggccagcgggtggtgcgccagagtttgcagcgtattgaattgctggccacctccagcaccagtgccagcgccagcatcgagagcctgagcgccgagatccagaacatcggcactgtgttgagtgtgatcaaaagcgtggccgaacagaccaacctgctggccctcaacgccgccatcgaagccgcccgcgccggcgagcagggccgtggtttcgcggtggtagcggatgaggtacgggcgttggccaagcgcacccagcaatcgaccgaagaaatcgagcggctggtcagtaccttgcgcaacgcggcacagtcctcggtgcagcagatccagcaaagcggcgaactggtgaagctggcggtgagcgatgccctggaaaccgagagcgccctgggcagcatcgcggtggcggtgtcgctgatccagcagatgaaccagcagattgccgcggcggccgaggagcaaagctcggtggccgaggagatcaaccgtagcgttaccagtatccgcgccagtgccgatcagtcggcgctgagcatgcagggcaacgccgcatcgagcattcagctggcgcagttgggcgcggaactcaaagggatggtcgggcacttccgcctgtgatcgcagcgttcatgcggcgatcacaggggagggcggtcaggcgttgttggcgaggaaggtcagcagggcttcgttgacgaagtcggggttttccctggcgctgatatgcccggcttgcgggatcaggatcaggctgcagccgatcaggccggccatttcctcggactcggcaggcgggcgcggtttgtcctgttcgccgcacatcaccagcgtggtgtcggcgtccagcttcggcaactgctccagcacatcctcgcgactgaagatcaagcgacccaggggcacgatgctctgcagcaggcgctccttggagtagccctgcaattgctggcggaaatcctgatacagcgcggattcgcggtcgatacccgggcggaagaagatcggcgcgaccacgtccagcaacggctcagggatagcgccggcgtcttcgatcatcttgaatagcgagaagtaatactggcgcgtggcctcgggctcggcacccaggtaggtgtccatcagcaccaggctgttgatccgctcgggagccagcagcgccaaacgtgcgccccacataccgccgaccgagaggccgaccaggttgatctgtggaatatccaactggtccagcagggccagggcctggcgcgcgaggtcgtcgagggagtgggttggcgcgggcagcgggccggattcgccatggccccacagctcgggcacgatcacccggtactgttgcgacagggcttcgatctgcggcgcccacatgtcgcggtcccacaggtagctcgagcccagcaggacgacggggccggaaccctggtcgacgtagtgcagcggttgtccatcaatgacggcgacaggcataacgggcctctgacttcatggagtgaggggcacttttttacgctagtcgggggcggggggatagatgcaaagtgatggcatctcgggaagcggcgaggttgtttgtactgacctggcttttatgactgtggtgagcgggctcaccacaggccagtcttcaagccagcgaatcagtcgtagatgactttcttcttccactcggcgtcggcgtcgaccactttgaggccttcggtcagttcgttgacttcgtcttcagccggcttgctgttggtcagcaccgtggagttggcgcgtcccagctgggcttccaggtgttgcagctgggcgctgtagatcaccggctccggctgtttgcgcaggtactgcacgccgcgttcgaatgccagtcgcgcttggcccggctggccttgttgcagggcgtgctggccgaggttgttgaagaactcgatatgcagcaacaccaggatatggcggatctcgcggatccagtgcttggcctcgttggccggcaggaaaccgtcctgggccgcacgggtgacctggccgtgcagggcttcgagcaggaaacgcacatccttggccttggcttcggtctggatcggcgcgggcgggttgttcaccgggatcgattcgccctgggccaccagcgtattcaactcggtgatgcgggccttgagcggcgcgctgcctttgttcaggttcagcagccgttggttgacgttgagttccaggcgggtcagcaataacttgagtgccggggtcatcaattggccggggaaggtctcggtgatttcaccgcagcggcgcaggcgatcgttaagctcgatctcggtgcgcttcttttccagcttgttgttttccaccacgtggttcatgtagccaatggcgatcagtattgcgatcccggctattaccagcagggtgatcatgagtggtgtcaccggtgtgacctctttatagggtttacagtggagtgtagtgactgggccatccggcggataggactgatcgaccagctgcccgggtagtttgcttctatatggataggcgttccctgcatggatgcacattgccatcatttgccggaacgaactatagcgtcttgtcgggcgccataatataggcgtcaaagcccggacgtgcacaattgccccatgagctcgaaaagctgggggaagtcattgattttaataaatttatccttgggggttgacgatctttcaatccgtccatagaatgcgcgccacttaacgcgtaaagcacacagcaaaacgcggttaagcagtgaatgttgtacgtgtgtccccttcgtctagtggcctaggacaccgccctttcacggcggtaacaggggttcgagtcccctaggggacgccatttgcgggaatagctcagttggtagagcacgaccttgccaaggtcggggtcgcgagttcgagtctcgtttcccgctccaatttaagcagtgtggcnnnnnnnnnnnnnnnnnnnngaatgcgcgccacttaacgcgtaaagcacacagcaaaacgcggttaagcagtgaatgttgtacgtgtgtccccttcgtctagtggcctaggacaccgccctttcacggcggtaacaggggttcgagtcccctaggggacgccatttgcgggaatagctcagttggtagagcacgaccttgccaaggtcggggtcgcgagttcgagtctcgtttcccgctccaatttaagcagtgtggccctcgggcggcactgagtgaaaccagggcatgatcttcggatctaacccctggacactgaaatacacaccatgtgtttcagttgtgtgtccccttcgtctagtggcctaggacaccgccctttcacggcggtaacaggggttcgagtcccctaggggacgccatttgcgggaatagctcagttggtagagcacgaccttgccaaggtcggggtcgcgagttcgagtctcgtttcccgctccatattcaacaaaaacgccgatcagcaatgatcggcgtttttgtttgtgtgcgatttgtgcagagccgccgcaggcccgctgcggcagcgttcactgcgtcgtcagggcctcctgcgccggcatgaaaaaacgcgcaaacaactcggattgagacttgatgttcaatttgttgtagaggttgcgacggtgaactttgatggtctctgccgacaggttcagcttgccggcgatttctttgttggaaaaaccgctcaacagcaacttgagcacatctttttcgcgcgccgtgatttgcgtgcccagttgcacgatggcctctgaccagggtggcggttcgtcctggcttttttccgcatcggtctcaaagcacatgcgctgatgcatcaacgccattacccatggcttgatgatgtccagggtcgcgatctgctgcgggctgtagcgcacgttgctgccaaatgaaatgcacagcgttctgtcggcgtcgagttgtacgttgtactgcacctcatccacgctgatgtactgggcgaaatactggtggtaatactcggtggtcaggaagtgctccggcgcgatgtcggacagatgaaaaaagccgctctgcgggttttcgcggttggcaatgtagaacgggtcgagcaggtacagcccttttacatagcgctgggtcaacgcgtccacttcgtccgcatcggcgacctcagtcacgctgaccacccgtacctgctggtcgctgaagatcagcacgacccagttgtcgatctggacgtattcctttaacacacgaaccagtgagctccagaacgccgggcggttcagttgcatgatcagcgtcccggccgaccgatgccaggccaggttgtgaaggtcgagcgacatgtactacccctttagggttaggcattcatggggcggggctaagtacttctaggtatttactaatcggacgtgccgagtatattcacccctcagcggatgaaggccatgatggcctgtcgtttttgacaaggatagcgatatgagtcaaccccctttgcgcgccatgttcatggcggcgctggtctgtgtgggcgcgagcgcgccggtcttggcggccgaaccccgggtcaacctgtacaactggttcgggctgatcgccccggaaacacccaaggaattcgagcagaaaaccggcacccgcatgcacatggatgccttcgacagtgccgagatcatgcagagcaaggtcatggccgggcgtaccgggtatgacgtggtcgtcgccacgtcgaatgtcttgcccagcctgatcaaggccggcgtactggcgccgctggaccgctctcaactgagcaacttttcgcatatcgatccggagatgctggcgctgctttccgccaatgacccgggtaaccgctacgccgtgccctacctgtggggcaccaccggcattggttacgacgtggacaaggtcaaggccgccctgggtgagaatgccccggtggacagctgggacctgatcttcaaggaagagaacatcagcaagctcaagtcgtgtggcgtggcgatgctcgactccccgagtgaaatcatctcgatcgccttgcattacctcgggctgcccagcaatagccagaaccctgaggattaccagaaagcccaggcgctgctgctgaagatccgcccttacgtcctctactttgactcatcccgaacggatgccgactttgccgatggcaatatctgtgtagtcgtgggctgggcgagcggggcgctgatggcacaggccatcaatgaaaaaaacaacaccgggcgcaagattgcctacagcctgccgcgtgagggcgggttggtgtggtcggaaaacttcgtgctgctcaaggatgcgccgcatgccaaacaggggctggcgtttatcaactacatgcttgagccgcaagtgattgccaagagttccaaccacacgctgtaccccaacgccaacaaggatgccaccgagctggtcgaacagaagttgcgcgacaacccctggatttatccatccaaagagaccattgccacactggttccccttgaaccgctgcccttgaagttggagcgaatccgcacgcgtgtgtggaccaaagtgaagagcggcacgtgaccggctgaatgaccaggcatgtcgggcggttgcaggcgtgccgttgaaggagatcaatcatgggccaagccgaatatcagcgcgacgtgaagtcggacgatgacgaggcgtacacggaaatcgaagaacagatcggccactgtacgcccgaacaagcctgggccatgtattacgtctcgaccggcatggtgcgtgagtacattacgcgggcggtgatggagcacattggccggggcaaccgggcgctgctgctggagttcccggaactggcccgggccgaagagaaatcccgcttcctgctgccgctctaaccgcatgccgatcagtgatgatcggcatttttgtgtgtgcgcgggtttgccgctttggccaggcgcaccgtggcctcacggatttctgcctgattgagtgaggcaaagcccaggcgcagtgcgttttccggctggtccatcggtgaaaactgccgaccactgcgtacgaccagcccatgctccaatgcggttgccaccatctgctcgacgtttatccgatcttcaaaacgcacccacagcgccagcccgccttcgggttcgcgcaccctgatccgatcaccgaatgccgcatgcaggcagccctgcaagacttcgcggcgggcgcggtattccttggatacgcggcgcaggtgtttcttcaattcacccgcgttgatcaggtccgcgagcatcttctgcgccaccgcgtcagcatcgcccagcatcaacgcggcgttgccgtgcagggcttcaatgaccggtgtgggcgccaccacatagctgcagcgaaacgtggaaccgagcgccttggacaacgagccgacatagagcacatggcgctgcgaacggtcactggccagcggcaggtagggtcgcccgttgaagtgatattcgtggtcgtaatcttcttcgatgatgcagaagtcatgtagagccgccaatgccagcagctgttgtcgccgcgccgcgtgcaggctcacggtggtggggaattggtggtgtggtgtcagatagatcatccgcaccttgtgctcgcgacacaggtgatcgatctggtcggtgcggcagccttcgtcgtcgacgtccaccgtgaccagttgcgcacccagcttgcggaaaatctcccacgccggcgggtagctcaggcgttccaccagcaccacgtcgccaggcttgagcagcaggctggcgctcaggtacagcgacatctgggtgccttgggtcaggcagatattctcggcgctgaccgtcagcccacggttgttgctcagcatttcggccagggcacagcgcaactcatagccggtgccctcactgccatagcgcaccgtattagaggcgaagctgttgcgcagggcattacggtagtagcggtgcagcacggcttggggcagcaggcggtggtcactggtaccgttgtcgaaaaacagtgcgccatgccgatgctgcagcgccgtcacctgggcgttctgagtgaagtacggagcgttcgcctgcgccaggaggggcggtgcaaacgactgctgcacgcgggcaggcggatgcttgggcgccaattgcgcattgacgaaggtcccacgccgcggctcgctgaccagccagcctttggtcatggcttcttcgtaggccaggatcacggtcttgcggttgacgtcgagcaactgcgccatttcccgcgtacccggcagcaaggtgccgggcggcaagcgaccttcgacgattgccgtcaccaggccttcggcgatcttgcgataggacgcctggctggcgctctcgtccagcttgagcagcggtcgccatttacgcatctggaccatctgaagtatccaaaactggaggttttaatgggcctagtctagcgcaacaatcaagcctcactcacccctgaggttgttatgcacacacgtcatgtcatcgaactgtccccctcggggaaaacctttgcggccggtgacgaactgttgctggatgcgatgcttgccagcggtctgtcggtgccgttctcctgccggcgcggtgcctgtgggtcgtgcaaggtggtcgtggccgaaggggagtaccgggccaagacccttgcgccggacgcgccggcgccatgctatccattggccgccaatgaaatgctgttgtgccagagtcatgcctgcggcgacatgcgcctggaaattcctggctggtcgctggatacgccgacgctggtggtcgaggcacaggtcgtgagcaagcgcgcgctggctccagacatcgttgagctggtgctgatgccggacatgccattggcggcacgggagggccagtacctcaagttccgtctggtcgacggcgactcgcggtgcttctcgatcgccaacctgccggccgacgacgatgggcgcctggtcttccacattcgccgggtcagcggcgggttgttttccgaggtcctcctggacgacttgcacgctggcgatctggtgcaactggaggggccttttggtgcctgcacctggcaggaccatgacgatgcgcccgtggtcctgttcgccacgggcactggctacgccggcatcaagccgatcctgctgagcgccttgaagtgcaatgtcgaggtgacgttgtactggggtggcgcgcagccggcggacttttacgaccgtgtgttcctggaccagtcagtcatcgaccatccgcgttttcactggcacccggtgctggcgtcgcaggggcgggtgcaggaggtagcgctgggccacgggcatcactgggatgccgcccatgtgtacgcgtgcggcaacggcgcaatgatccgccaggtccgcgagcagtgcctcgacgcgggcttgccggctcaccggtttgtcgccgaagcctttgtgcccagcggtggcgcaggtgcgcaaacgccttcacctgcgtttgacccgatctgggaaaaggtcggcccccgttactcgttcgacggcatgctggcggcccgtgaccaatccatccgcgccctggcggccattgccagccggctgcgggtgggcatgactaccggcgaagccctcgacatggccgccgaacaactgctggcgatgggcgcgtcacacacctggcacccgacctatattcgcttcggcgccgacacggtccgcccaccccgcgaagggatcgaccgtcagcgcaggctgcgcgccagcgatatcgtcgtggttgacctggggccagtgtgggacggctacgagggcgactatggcgatacctttgtgttcggtgactcgccgctgcacctggcgtgcacgaccgcgctgcacgaagtgttcgacgagacccgcgacgcctggttgcgcggcctcaccggtcgcgaactgtatgacttcgccgagcagagcgccgtggcaaaaggctggaggctggcgcgcaatctcgcagggcatcgcctcgcggacttcccccacgcgttgttcgagaacaaggagttggcggatctggacatcccgccgagtgaaatggcctgggtgctggaaatccagctgtgccatcccacggaaccggtcggtggatttttcgaggatatgttgatgctgcaagcctgaagagcccgccattgcggcgggctccttaacatcagagcttcggcagttggccgatacggcccatcatttcggtgacgatctgcaggtcgagcaggaactggtcgacggtcttgaactcgccgtcggtgtgcccggtgtacttgacttccgggcgcgccaggccgaattgcacgccgttgggcagttcatgcaccgaggttgcgccggctgaggtgccgaacttgtgctccatgccgaggttttccgtggcgactgccagcaaggccttgacccactcaccttccggattgcggtacatcggctcggccaccgagtaggtgaagcccaccttgaccttggttttcttgtcccaggcgctcagtttgtcggcgatttcggccttgagtttctctggcgacttgcccttcggcacccgcaggttcaccgccagcttgaaggctttgtcatccaggccgacaaaggtcagcgaagtggtcagcggccccatgaactcatcggagaagcccacgcccaacttgccgcccaggtagtccaggccccagttgtcggccgcataccgcgccgcatcggtgatgtggttgtgcttgagggcgatcttgccgtcgacgctgtggatcagctccagcatgcgcgccaccgggttgaccccggactccggctcggaggagtgagcggacacgccggtgacggtcagcttgacgtctttgccgtcgaccttggcggccactgcaaaatcgccgccgttgcgcttggcgtattcgctgccggccttttgcaggctggcggccaactcggcaggtttgtcgctgacgaaggtcgccaccgacgccgacggaatctggttggtagccatgccgccggtcatcgcgatgatttccgcgcctttgccttcacccttgcgccgtgggaacgtcgccatcaccgtgccgtagcctttctcggcgatcaccaccggataaccgccatccagcgcgaggttgtactgcggtgtcgggttcttttcgaagtagtaggggatcgcgtcgccggaggtctcttcggtggtgtcgaccagcagcttgaaattgcgcgccagtggcagcttttcttccttgatcaccttcatggcatacatcgccacgacgatgccgttcttgtcatcttcggtgccacgaccgtacatgcggtcgccgatcagcgtgaccttgaacgggtcgagtttggtgccatctttgagcacccaattttccggcgtcaccggcaccacatcggcgtgggcgtggataccgacgacttcgtcgccactgccttccagggaaatctcgtacacgcggttgtcgacgttgcggaagttcaggttgaaggccttggccaggtcctggagcttgccggcgatcttgatgaattccgggttcttgtactgcggcaggccgtcgacgttgaaggtcgggatttccaccagttcgcgcagggtttcgagggcggctttgccgtacttcacccgagtgtagatgcccagcaggcgattgatttcgttctgctggtcggcgctcaggggtttgttgtcgaggaaggcattgattgccgggccgacgtcgctggtcttgcccaggtcgcctttagccagcgcgccgaggaaaccgcgaaaatcggtgatggacgtttcgttgaagttcttgagaatcgccgtgctttgctcgggcgtgatgttggcgaaggcggggcaggtaaccgccgacaggctcgccgcaaacagggtggcagccgccaattgcttgagtggaaagtgcatggagagacgcattcctttgcaggtagtgagtaggaggtttctgatcgatctgtcagaaacatttccacacactaccattagtcaggtgcctctggtcaatgctggccaggatggggctcggggtactcctcagtcacgtccaaggctctggcgtagggcccatcccacaactgctcatgcaattgcccgacacgcttggccatcgcttcgttgtgcatcaccacttccaggttgcgcgaattatccaggtagccacccagccaattgctggtgccgacccacgcaacttggccgtcgatctccatggtcttgctgtggatcacccgcgcatacgggataaacccttgtttggcctcgggcagggtcacgatcttgatctgcacgttgggcagcacggccaggctcttgaggtagggcagctccagcttgtcggtgttccagttggacaccatcagcttgatcgacaccccacgcgccgctgcagcgcgtacggcgttgtcgatcaccgcgtagtacggacgggtcttgtccggtccgtaggacaacggcgcgtagtccagcaattgcacgcgcacttcctgcttggcttcgctcaacaggcgcggcagttccagctgtgagtcgcccacgccaggcgggttgtagcgctgcgggctggcgaccaggtagttgccggtgcgcggtgcctccttgccagcaacgggcagcggcaccggctggttgtcggtcaaggcctgctgggcgttccagtcctggtcaaagatggcctgcacttggcccacgaccgttgcatcggtgatacgcagcccggtttcgtgaatgtgttccagcgagcgccaatcgaaattctggctgccgacaaacgcctgcttgccatccactaccaggtatttggcgtggatgatcccgccactcacacgggcgtagggcaagacgcgaaaggtcaggttggggatcgcgcgcaggcgttccagggtggaggcctccgacaacttgatgcctttttcttcgagcaaaaagcgaatcttcacaccgcgtttgccggcggcttccaggcgctcgatgacacggtccatcaccgaaccggggtgatcggcggcgtagaactggccgatatcgatgcggcttttggcgccgtcgaacagctcgctccagaccgggccgggctggcgcaggtcgtcggtgccgagggcgctgtccaccggtacggtgtgtaccagttcaaaccccggaatcgaaaagtccgcctgggccagcggactgaggagcaagccggcaaggccggcgatacgcaatttcaaggagacggacataacactctcttcactgatgtagtgagcgggcttgccccgcgctgggtggcgcagccgccccaaacattccaccgcgttgtcccagaaagaccgaggtgcctggatatggggtggctgcgccacccaacgcggggcaagcccgctcaccacaggtttatgcggtgcggctgtgcagcggcgtcggtacccgatgcggcacttcactctgcacacgggcaccggtggcggcgcggatcagcaggatcttcagctggtcgttgatgcgctccaggctgtcctggaagaagttgtggaacaccacgcagaacagcgcgatggcgatccccaggccggtggcgaacagggccgtgccgatgccgccggagatctgccctgggtcggacacgcccgccgtcgccagcgccttgaaggtgtcgatgatgccgaggatggtgcccagcaagcccagcagcggcgcggcggtggtgatggtttcgatgatccacaggctgcgggccagcggcgcgcgggtggtcaggtactgggtttcgatgacgtcatccagatccttgcgcgagccttgcgaggctttctgtgccagcaccggcaagaccatgctcagcggcaggctgtcacgccgggtcaggctctccggcaggtcgcgttcgctgtgcacgttggcgccgagcacctcgttcagcgcgcgggcctggcggcgtacatacgcgaagtaaatcccgcgctcgatggtgatgaagatcgcgatggccatcgcggcatacatcacatagaaggtgatgtcgtggagcaggttcatgtccatgttcacttacctcgcaattagaaattggcttccagggaaaccgtcacggtgcgttccaggcccacgatgtaggccgggtcgccgtcgcggaaaccgccgtaggtggccgcgttggtcttggtggtgtacacaccgtccaagtacttcttgtcgaacaggttgtcgacgttcaggcgcagggtcgcgtccttgaccaccttcttgtccactggcaggtagataccggcgccggcgttgaatacggtgcgcccggagatcgcttcgtcgttggtcaggtcgccgtagagcttgctggtgtacttgccgccgaaggtgccgtagaagcggccgtcgtcgtagccgatgttggcggccagcatgtttttcggcacgttggcgaactgcttgccgctggtgggcaatacgatcgctttgccggcgttgtatacggtcaggtcgtcttgctgctcggccttggtgtaggtgtaggaggtgtagtagttgaagtgattgggcagcaggccgctccactccagttccaggccgctgttgttgacggagccggcgttgatgtcggcgaagtcgccgttgatatcgcgcgacgacacctggcgatccttgaactgcatgtagaacaaggtggcggccacggtcatgtcttcatcggtgtagcgccagcccagttcgtggttccaactggtttccggcttggcgtcgatggagcctgcgcccttgtcgtacagcacgtagttctgcgggatgcgcatgttgcgcgacaggctgtagaacacctggtcgcgttcatccacctggtatttgaggccggcgttgggcagcagtttgttgtaggtctggttacgtttttctgcttgctcggtgaggctgccatggttggtgccgtcacgcttgacgttcatataggccagaccgccgatcagggtccagtccgagttgatgtaccaagtgtcctgggcccagaccttctgcgccggggtgatggtgaagcggtcgcggccctggatggtgttgccattggcatccaccaccgcctcattggagtccggccaggtatcgaccggcttgccattggccttgagcggaatgaacggctgggtctggctctggcgcgcgcgctcgtaccagtagcccacttgcacgctgtgatcgcccaggtcccagttcagtttggtggtgatgcccggacgccaggtctgggtacgtgaagggcggtagtacacgccgctgttcggggtgccgtcggcgttgtattgggcgccggtgggcaggttgcccaggtcgaacacgccgccctggttcgagccgcggttgagggcatagctggacgagccgacgccgctgccgttaccccagtagtagtacgggatcaccgacagcgcgaggttgtcggccagtttgaactgggtgttgagcacggcggtgaacgtctggaacgggttctgcgccagggcgtaataactgttgtacttgccgttgctacccacggtgggcgtggcggggtaagggtcgtacttgcggccgttctgctggaactgcgccttggtcagttggctgtaactgttgttgtcctgctcatggtacttgaggatcaggttggcggtgttgccatcgccggcatcgaagaagctgttccactcgactttgtccgcacgcacggcgcccgaaccgcgccacatctggccttcggtgtgggaggccgacagccagttgctcaggccgttgatctcgccggtgttgaggcgggcgaaggtcttgcgggtggcgttgctgcccatgacctgtttgacgaacgcaccggtttccttggtcggtcggatggtcacgatgccgatgttgccgccgctggagccgatgtgcgggccgtcggcttccgaggaaccctgggtgacgaagatctggtcgatgttttccggatcgcccagcaggttggagtacagcgcgtagttgccggagtcgttgatcggcatgccgtccaccgacatccccacctggtcggagttgaggccgcgcatggtgaagcgaaagcccgacaggccggtgttgtcttcgctggaaatgttcaagcccggggtgtacttgagcttgtccaccgcgttgccggtggcggtctgtttatccagcgcttccttggtcacggtggagcggcccttgatgctttcttcctgcaccatgtagccgccacctgccgtggccttgccctgaaccccaatagtcccgacgtcactgtcgcgggtgtcggccatgaccattccatggcccatgcttgcggcaacaagtgccagatgaatccgtgtgaacctcatctctgtcgtcctggtgtcgggtgcttattgcacgctgtagttgaaggtggcggtgaagcgctgctcattgcggcccccgaaggcttgctcggggaacggcttgacttgcttgatgcgacgcaagctgttggtggcggcccggttgagcaacatgctcgaggcctgggtttgcaagccggagtcgaggacccgaccctggcggtcgaccagcagccagatcaccacttcgccgctcgggcgttcgagggaagcctggcgtccggtggggtactgcttgtaggtgtccaactcgttgcgcaaccccttgaggtaaccgccttccagcgcttggccgtcgaccttgggcggggcgggcggcgcgggtgtcggtgctgcctgggccacaggtgccggtgccggtttggcggcgaccggaggtggtgtcggtactggcgttggcttggccaccacgggcttgggcacaggttttggcttgggctcaggcttgggttttggctgcggcttgggcggtggcggcggcggggctggctcggcctcttcatcctcgatcaccggcggtggcggctcttgttccaccaccggttccgggatcacttccggctccggctcgaccaacgccagctcgacggcggactcgtcatacaccggttcgaccttcaaggtctgggactggatacccagtgcaatcagcaccagggcgatcagggccgggacactgcccagcagctgacgcgcacgaaacaatacgtacatgatcaggacttacgcgtggcaatggacacggaggtaaagccacccagacgcagggtgtccatcacctccaccaggcgcgaaacctcgacgcctttgtcgctgttaacgatgatggtcgacttggtgtcaggcttttcggctgccttcaacgccggcaccagcgcatcgaccgtgaggtccttgccatccagctgcaactggccttccaggcccagggtcaggatgaatttgttctgtggcttgagctgctgcgaactgctggcgctcggcagctgggtcttcatgccgagggccggaatcacgttcaggctcacgagtacgaaaaacaccaggaggaacatcatcacgtcgatcatggggatcagttcgatgtgcgccttgcgttttttcggttcgtcccaggttctcattccgctaccccgttattgaattaggggcgacacgctaacaaccaaaaatgaccgattggttaactttaattgacggttttagggctctaggacgcgtctttcagatgactcttgagtcatttttgtgacgtaacagaattgaaacccggcaggggcattctcaaaaactttacatcgagggcccccagagatgagtagcgaattgccatgtctttccaccccgcggcttctattgagagcactggaaaagcaccaggccgagacgttgtgcaccctcgccaacgggccgaagatcgccgataacacggcgagtattccgtcgccctataccctgcaaacggcgcaggattttatcgacggcatgcaggagaaatttcgctctgtggggttgctgagcctgggcgtgcatgtgcgcgacagcggcgaactgatcggcatcgccagcctgcgcatcaatgcggctcatcactatggacaccttggcggctggacggcggcggatgcacgcaacctggggtatgcgaccgaggccgcgaccgcgttgatggactacggctttggcgaacttggcctgcaccgtgtgggcagccagtgtttcagtcgcaacaaggagtcggcgcgggtcatggagaaaatcggcctgcagtacgaaggctgcatgcgtggggcgtttctcaagaatggggtgcatgaagacatgctggtgttcgccaccctgcgtgaggattgggagtttcggctgtgagcggcgacgttgatcacggtcggcgccgggtcctcgccgggctggccgttgccaccaccttttcgatcctcagcccgtttgcgcgcagtgccggggtggactacccgttcaccttgggcgtggcctccggcgatccattgcccgacgggtttgtgatctggacgcgcctggcgccgctgttcaatgccgccgatggccggggtggcttgagccgcccggtgccggtgcgctggcgagtcgcccgcgatgcggcgatgacccgcgtggtgcgccagggcgaggtcatcgccactgagcgctgggggcattcggtgcatgtggaggtggcgggcctggagccgggcaggccgtactggtaccagttcgaagggctcggcgcgcaaagcccggtggggcagtcgcgcacggctccggcggtgcatgccatggtgtcggcacgcttggggtttgtctcgtgctcccattgggaacgtggctatttcagtgcgtatcgccacctggcgcaggagcaacccgacctggtgttttttctcggggactacatctacgacagttcctacgcggcggattccggcaagatcattcgcccccatggcagcggcaatgccgtcagcctgagcgactaccgcaaccgttatgccttgtacaaaaccgatccggatctacaggccctgcacgctgccgcaccgagcgtggcgacctgggacgatcacgaagtgcagaacgactacgccaaccgctggtcccaggacccgaagatcccggtggggcaatttctgcagcagcgggccgcggcctaccaggcgttttacgagcatatgccactgcgtgccagcagcttgccgaaagggccggacatgcgcatttatcgacgcatggactacggtcgattggcgcgtttccatgtgctggacggccgacagtaccgctccgaacaaccgtgcattctggcgaatggcagtcaccaggggcatatcgccgataacctctgtcatgacttgcgcgacccaggtcgcaccctgctcgggtggcaacaagaagcctggctggaccagggctttgcccagtcgacggcgcagtggaacatcattgcccaggacttgctggtggcgccgttgacccagcgcgacctgaccaaccacaaaccggggcgctggaccgatggttgggatggctacatggccaaccgttcacggatgctggcttccctcgagcgcaatcgggtcaacaatccagtgttctggggcggcgatattcattcgttctgggtgacggacttgcatgccgatggcaacaacccggattcgccggtggtcgccacggagttcgtcggtacgtcggtgacgtctgacgggccgccgtttgaggcgttcagcaagatcctgccgcttaacccccatgtgaaattctttgacagtcgtcagcgagggtatgtgtcggttgaggtgcaggagggcaggatgctcacgcacttgcgcgtgattaccgacccgcgtgatccggcggccaccgtgtcgacgctgaagtcgtttgtggtggagtcggggcgggcgggggcgatagaggtgtaagggatagacgcactttttgtggcgaatgagctgttgtggccagtggacttattgtggtgagcgggcttgttgtggcgagcgggcttgccccgcgttgggctgcgnnnnnnnnnnnnnnnnnnnnnnnnnnnnnnnnnnnnnnnnnnnnnnnnnnnnnnnnnnnnnnnnncgcagcccaacgcggggcaagcccgctcgccacaagggtgagtgcggctggttcaagcgatttcgtagcgtaccgacaacgcgccctttttctccgacaacgccaggatggtgacctggcccagttcacccaaggtctgcacatgagtgcccccacaggcatacgcaggcaattcgccaaagccgacctggcgggtgccgtcttccaggttcatatggcgagggtagtctgcggcgatccattggttgacctgttgctggatcgtctcggcttccatggctcgcgccgcgtcaccacgtataaaggtgatcttgccttcgcccggccagtgatgagccttgatcggcatccagcccaggctctcgcccacgttgccgatcaagtgcccggcggaatgcagccgggtatgcaacgcccggcgctgttcatcgacccgcgcgatgacgggacccggctccagcgggcggtcgatgtagtgcaccacgcgatcggcctcttggataacgcgcagcacagtgctctcgccgagccagccggtatcgaagggttgcccgccgccctgtggatgaaaaatcgtcgactgcaggatgaccgcgaactggtcctcatggggcgtgcaactcagcacctccagttcggcagtcaggtggtcgtgggtgaaaaacaggcgttcggtcatgatctacatccgcatcagggttctgcgggcagtataaatagtgcgcggatgggtgataatccgctcagttatcaatggacctgtgcaccatgagcatcaatctaccgttgccgctgctgggcgagatggcgattttcgtcaaagtggtggaaaccggcagcttctcccaagccgcccggcaactgggcgcttcaccgtcctcggtgagccgcagcatctcgcgtctggaaaaggccctggccacgcgcttgttgcaacgcaccacgcgcaaattacgcctgagcgaaggtggtgaagaggtgttcaagcgctgccaggagatggtcaacgcggcacgttcggtcatggagatcagcggacagttcacccacgaagccgaagggctggtgcgggtcagcgtgcccaaggccgtggggcggtttgtggtgcacccgcatatgccggagttccttcggcgttatcccaaggtggatgtgcagttgatcctggaggatcggcaggtggacctgatcgatgacaacgtcgacttgagcatccgcatcaccgacagcccgccgccggggctggtcggccggcagttattgcctatcgagcatttgttgtgcgcgacgccgcagtacctggccgagcatggagtgccgggccatccccatgatctgttggaacacagttgtatctacctgggggaaacgccaggggactcgcgctggaaattccgccaggcgggcaaggcggtgacagtggcggtgcgcggccggtatgcagcgaaccacaccggcgtgcggctggatgcagtgttgcaggatgtggggattggcagcctgccgtactttacggcgcgccatgcgctggaggaggggcggttggtgcaggtgttgccggcgtgggactttatcgcgtcctatcatggcgaggcgtggttgctgcattcgcccacgcgctatctgccgccgaagttgcgggtgtttattgattatctagtggcgtgcatggcgaaggagccgacattgcgacggcccattccggatcgctgatcagtgcttgctctggtcgtcgggcatggccagcagctgtttttcctggttccagtcgaacggttcgtcattctgttcggcttcaaaacggcgctcttccagggcctggtacaggtccagttcttcatcgggcatgaagtgcaggcagtcaccgccaaagaaccacagcaggtcgcgtggcaccaggtgggcgatctgtgggtagcgcaggatgacctggctcatcaggtcctggcccaggtactggctttcgatcgggtcgatcggcagcagggcgcgcagttcgtcgaaacgctccaggaacagggagtggctttcctcgggcacctgttcggcttcgccgacggcaaccaggatgctgcgcaagtggtcgagcaagacgagatgatcggcaacgacgttggacacgagataagtcctctaaagcaaaaacgggcgcgagagtatatagctcggtgccctgcctcacaaatacgattcattttgacgagtggctgttgttgtcaggcaaggcgccgcgacgactcatagctcggctatggggaggagcggcaacgcagcgtggcgacaacagacgccgtcaaaatggatcagtatttgtgaggcagggcactttgcccgcatttatatgaccgctcgcctcagcggactttaccctcagcctgggtcagctcttccttgctgaagtcatccacgtcgatcaccttgcgccgcgccgcttcggcgtcacgcagggtctgcgcttcagccggttgcagcacgccggcgtgcagtgccgcatcaatggcatgctcgccggcagcaggtttgacctggccactcttgagcgcggtgtgcagtttcttttgcagcggatggctggcgcccagcaggtcgtaggcatgttgcagggcacccaccgggtcttccgccgattgcgggcggtagcagccggccagcaattcttccagggtcgggtcgcctttggcgcggccgatcacggcggcgacttcggcgtccagcgcatcggacgggccggtatggcgacgcccgaacgggaacacgatcacccgcagcaggcaacccagcaccttgttcgggaagttgctcagcagctcatccagtgcgcgctccgattcgcccaggctttcttccatggcccaggcgaacagcggttccaggtgatccggcgaatccaggtcgtggtaacgcttgagtgcggccgatgccaggtacatatggctcagtacatcacccaggcgtgccgacaggcgttcacgacgtttcaactcgccacccagcagcatcatgctcaggtcggccaacagcgcgaacgcggccgcctggcggttgagtgcgcggaagtaaccctggctcaaacgattgcccggtgccttctcgaaatgcccaacaccgaggttcagcaccagggtgctggcggcgttgctcacggcaaaaccgatgtgttgcatcagcaggctgtcgaattccttcagcgcctggtcatggtcttcgcgaccggccagggccatttccttgagcacgaacgggtggcagcggatcgcgccctggccgaagatcatcaggttgcgcgacaggatattcgcgccttccacggtgatgaagatcggcgcgccttgccagttgcggcccaggtagttgttggggcccatgatgatgcccttgccaccgtgcacgtccatggcgtggctgatgcactcgcggccgcgctcggtgaggtggtacttgaggatcgccgacagcaccgagggtttttcccccaggtccacggcattcgcggtaagcatgcgcgcgctgtccatcagccaggcgttgccgccgatgcgggcgagggcctcctggatgccttcgaaggccgacagtggcacgttgaattgctcacgcacctgggcgtactggccggtgaccaggctggtgaacttggctgcgccggtgccgaccgccggcagggaaatcgaacggcccacagagaggcagttcatcagcatcatccagcccttgccgagcatttcctggccgccgatcaggaattccaggggaatgaacacgtccttgccggagttgggaccgttcatgaacgcggcgcccaggggcaggtggcggcggccgatttccacaccgggggtgtcggtggggatcagcgccaggctgatgcccaggtcttcttcgtcacccagcaggtggtccgggtcatgggccttgaaggccagcccgagcagggtcgcgaccgggccgagggtgatgtagcgtttttcccagttcaggcgtaggccgagggtttcctggccttcccattcacctttgcagatcacgccagtgtcgggcatcgcgccagcatcggagccggccagcgggccagtcaacgcgaagcacgggatatcatcgccacgcgccaggcgcggcaggtaatggttgcgttgttcttcggtgccgtagtgcagcagcagctcggccgggccgagggagttgggcaccatcacggtggaggccaggtcgccgctgcgggtggcgagcttcatcgcgacctgggagtgggcgtaggcagagaagcccttgccgccgtattccttgggaatgatcagggcgaagaaaccgtgggtcttgatgtgttcccaggcggcgggcggcaggtccatggcctggccgatttcccagtcgctgaccatggcgcagagttcttcggtggggccgtcgatgaaggcctgttcttcttcggtcagttggaccttgggataggccagcaacttgtcccagtcagggcgaccgctgaacagctcgccgtcccaccacacggtgccggcgtcgatggcatcgcgctcggtttcggacatcggcggcaggactttctggaaccaattgaacagtggcttggtgaagtattggcggcgcaggtcaggcaacagcaggggcgcggccaccacggcgatcaacacccagaagatcagcaacagccaacccggtgcgtggctccaggcgcccatcgccagcaggtagacggcgaccacgcccagggcgggcaggggggcgacgcggcggtgtgcgaggtaggcaatgctgaccaccagcaccagtatccacaacaacagcatattcaatcctccgtgaaaccaggggcgaaaccaccagggagcttagtcggcatccgaacaagcggggtgattagggtgtaacgagatttggccgattcgtcgttatcgccgtggcagacctgtcgttaaactccaggcttccttcggagataaagctcatggatacgtacctgagtcccagccgcttcatcgatagtgaccaccctgcggtggtggagttcgccgaaaaacatcgcggaacccacgcggctccaagtgaccaggcagtcagtctttactacgccgtgcgtgagacaattcgctacaacccctacaccttcagccgtgatccagacaccttgagtgccagtttcgcgttgagcaccggcgaaagctattgcgtgcccaaggccaccttgctcgcggcctgtgcccggcactgcggcatcccggcgcgcatcggcctggcggatgtacgcaatcatttgtcgacgccgcgcctgatcgccttgctcaagagcgatgtgttcgccatgcacggttacaccgagctttacctgaaccatcgctgggtcaaggccacgcccgcattcaaccagcagctgtgcgatctcttcgatgtgccgccgctggacttcgatggcattcatgacagcgtctttcatgcgttcaaccgccagggcctgcgctcaatggagtatgtggtcgaccatgggcaatttcccgacgtgcccgaggcgtttttcttcgcgcatatccagcagtgttacccccacctgtttgccgaggacatgccgcccctgctgggtgatatgcagagcgatttgagccgcgcgtgaaccggcgtatgctgctgccttcatctagccatgttcatcaacaataaaggcgcggtcatgctgaaaatctggggtcgtaaaaattcatcaaacgtcaggaaggcactgtggtgcgccgaggaactcggcctggactatgaagcaattgatgcgggcggggcttttggcgtggtcgacacgccccagtaccgggcgctgaaccccaacggtcgggtgccgatgatcgaagatggtgactttgtgctgtgggagtccaacaccatcgtgcgctacctctgcgccaagcacgcctccagctggtacccgagcgacctgaaggcccgcgccaacgcggaaaagtggatggactggaccacctccaccttcgccgaaccgttcaagatcgtgttctggggcgtgttgcgcaccccggcggaaaaacagaactgggacaacatccacgccggtcgccaggcctgcatcgatgtgctcaaaaccgttgatgaagccctggccacgcagccgtatctgtcgggcagcgagatcggcatgggcgatatccccttgggcagctttatctacgcctggtttgaaatgcccatcgaacggcctgcaatgccccatctggaggcctggtaccagcgcctgcaacaacgcccggcctaccgcaaagcggtcatgaccgcgttgacttaatacccactattaatacgggtgactgtacttgtgcggcgcgggcaagcaccatgcttgtcatgcgccgccgttgaactacctgggctgcgccctcatctactctttctattcccttctttggtgcgtattccgatatgagttccgctctgtccatccggcagctaaccaaaacctacggcaacggtttccaggccctgagtggtatcgatctggacgttgccgaaggtgacttcttcgccttgctcggccccaacggtgccggcaaatccaccaccatcggtatcctctccaccctggtcaacaagaccagcggctcggtgaatatcttcggccatgacctggacaaatccccggcggcgctcaagcgttccatcggcgtggtgcctcaggaattcaacttcaaccagttcgaaaagaccttcgacatcgtggtgacccaggcgggctactacggcatcccggcgaaaatcgccaaggaacgtgccgagcagtacctgacccagctgggcctgtgggacaagcgcgatgtgccttcgcgttcactctctggtggcatgaagcgtcgcctgatgatcgcccgcgcgctggtgcatgaaccacgcctgctgatcctcgatgagcccaccgcgggcgtggacatcgagctgcgccgctcgatgtggaccttcctcaccgagctgaacgagaagggcatcaccatcatcctcaccacccactacctggaagaggctgagcaactgtgccgcaacatcggcatcatcgaccacggcaccatcgtcgagaacaccagcatgcgcaacctgctgggccagttgcatgtggaaaccttcctgctggacttgaagaacaacctgtcggcgccgccgcaattgctcggctacccgagccgcctggtggacagccataccctggaagtgcaggtggacaaggccatgggcatcaccgcgctgttcacccagttggcgactcagaacattgaagtgctgagcctgcgcaataaaaccaatcgccttgaggagctgttcgtgtccctggtggagaaaaatctgtcgaaggtggcggtatgagttccgaactgcaacccaacctcgtcgcgctgcaaaccatcgtctaccgcgaagtgaagcgctttacccggatctggccgcagaccctgctgccgccggcgatcaccatggttctgtacttcgtgatcttcggtaacctgatcggccggcagatcggcgacatgggtggtttcacttacatggagtacatcgtgccgggcctgatcatgatgtcggtgatcaccaactcctacggcaacgtggtctcgagttttttcggcagcaagttccagcgttccatcgaggaactgatggtgtcgccggtgtcgccccataccatcctgatcggctacaccctgggcggtgtactgcgtggtctgatggtgggcgtgatcgtgacgctgctgtcgctgttcttcacccacctgcaggtgcatcaccttggggtcaccattttggtggtggtactgacggcgacgatcttctcgctgctgggctttatcaacgcggtgtttgcacgcaacttcgatgatatttcgatcatcccgaccttcgtgctcacgccgctgacctacctgggcggggtgttctactccatcaccttgctgccgccgttctggcagaccgtgtcgctggccaacccggtgctgcacatggttaacgccttccgctacggcattttgggtgtgtcggatatcaagatcagcgtggcgatcacgttcatgttggtggcgaccgtggtgctgtacatcggttgtgcgcgtttgctggtgagtgggcgtgggatgcgtacctgactcaacgggtgtacgcgggcaaaaatgtgggaggggcggtgcgacgactcgacttgcccccgatagcgttctgtcagtcattcatgcactgactgatccactgctatcgggggcaagccccctcccacatttgtattggcgtaacgtcaggaattgagtgccagttcgatcagcccgtgcagctcttccaccgtcagtggcgcggtcgagaacagaatgcgaaacaccgtcggcgctgcgatcaggttgatcagatggtccacgctcggtggcatctcgtccggatagcgatcgacaatcgcctgaaactgcccgctcagaatgctcacgcaataccccggcgtgatcatgcactgcaggtcgcgcatcatgttgcggcccggttccgaactcatttcatccaggtattgctcggcccaggcctgcaggtcgccacgcaggctgccggtgttggccggctcgctgtcggggcgcatgcgcgccagcgccacgtccgccaatagcacggacagatcgccccagcgccggtaaatggtggagggcgtgacgcccgcacgcgccgcaatcatcggcacggtaacgctggagcgctcatgggcttccagcagttcgcgcacagcgttgtgcactgattcttggacccgggcactgcggccccccgggcgaaggccttctttaatcgccatgctggtgaccttaacacaaagaatttgctttaagcgctggccggtagcacactctgcaaaagcaaaatattagctttagcggagcgtgcgtatgtccagtcctgtttcccatcgttccagcctggtgttccttgcggtcactttgctgacgtttctcgcggcctccagtgcgccaacgccgttgtaccacctgtatcaggagggcctgcatttttcggcaggcatgctcacgatgatcttcggggtctatgccttgagcctgctggcggcgctgttgaccgtcggctcattgtcggaccacctggggcgcaagccggtgatttttgctgcgctgcttctgaatatgttggcgatgttgctgtttatcaatgaaggcagcgtggcctggttgattgccgcccgtaccctgcaagggtttgccaccggcatggccactgccgtgctgggtgcagcattgctcgacaccgaccgccagcaaggcccactggtcaacagcgtggcaccgcttttgggcatggcctgcggggcgatgggcagcagtctgctggtggagttcgcgccattgccgacccagttgatctactggacgctgctggccttgatgctgttgcaggccctctacgtatggcgtttgccggagacagtgagccgcatccccggcgcactggcgtcgctgcgcccgacgttgcacgtaccgccccaggcgcgccgggcgttgtggctgtcgttgccggtggatatcgccgtctgggcaatgggcgggttctatttatcccttgcgccatcgttggtgcgtgcggccaccggctccacctccaacctgatcggtggcggcctggtggccgtgctgaccctgagcggcgcgctgatgatctttaccctgcgcaatcgtgcggccgacaaggtgctgcgtctgggcgccggcttgctcgccatcggcgtgacgctgatcctcaccgccgtgcacagcgccagcctgccactgttcttcatcgccacccttatcgccggcagcggctttggtgcgggctttctcggcgccttgcgcagtgtggtgccactggccttgccccatgaacgtgccgggctgatgtcggcgttctatgtgctgagctacctggcgttctgcttgccttcattgctggcgggcaacctgattcgcagctttggcctgatcgccaccaccgacggctacggcgcagtcctcatcctgctggccctcggtgcgttggttgcgttgctgctgcaggattcggcgcgggtgagggcgacgaccggcggctgatgggtaataatcggtgcccgtattcgcctgatcgagattcaagtatgaagatcatccgcagcaaggacttcaccggcagtcgcgcttgggaggcgctggatattgccaacatgaatggcatcaccacgcgcctgcactggaccgaccagccgtaccgctggcacatcaatgacggtgaagaggtgtttgtggtgctggatggtcgcgtgcagatgcactaccgcgacaatggcttcgaacaggtggcggagctggaggtcggcgacatcttctacgccagtgtcggtaccgagcacgtggcccatccccaaggcccggcgcgcattctggtgatcgaatgcgaaggcagcgtttgacgctatatcggcaaaacagataacagttagagatattacccgttatatagatattcgatcaggttctatgatggcctcaacctcatacgagaaagaggagcgtcatcatgccctgctcgaataccctcagctacaaacccttcagtcacctggcccgtccacgggaagtgattcgccagttcacccccaactggtttgccgcgaccatgggcaccggcgtgctggcgctggccctggcgcaactgccggtcaacctgccaggtttgcacgccatcgccgaagcgctgtggttttttaccatcggcctgtttgtgttgttcagcgtgctgtatgcggcccgttgggtgatgttcttccacgaggcgcggcggatcttcgggcactccacggtgtcgatgttcttcggcaccatccccatgggccttgcgacgattctcaatggcttgctgctgttcgggttgccgcgttggggcagcgatgtgataccgctggccgaggccttgtggtggctggacgtggccatggccctggcctgtggtgtgctcatcccgttcatgatgttcacccgccaggaacacagcatcgaccagatgaccgccgtgtggctgttgcccgtggtcgccgccgaagtcgccgccgccagcggtggcctgctggcaccgcacctggcagacgcgcattcgcaactggtgatgctggtgaccagctacgtgctgtgggcgttttcgctgccggtggcgttcagcatcctgaccatcctgatgctgcgcatggcgttgcacaaactgccccacgccaatatggccgcgtcgagctggctggccctggggcctatcggcaccggtgcactgggcatgttgctgctgggcggcgatgcgccggcgatcttcgcggccaatggcttgccgggcgtgggtgacatggccaacggcctggggctggtggccggtatcacgctgtggggcttcggcctgtggtggatgctgatcgccgtgttgatcaccttgcgctacttgcgcgcgggcatcccgttcaacctgggctggtggggcttcacctttccgttgggggtgtatgcgctggccactttgaagttggcgagcctgttgcacctgggtttcttcagcgtattcggcagtgtgttggtggtggcgttggcgctgatgtggctgatcgttgccaggcgcacggtgcagggcgcctataaaggtgagctttttgtttcgccatgcattgcgggactagggaataagtaagcggagttaggtaaagtcgtggcctgataactattaggccacgcaggaacacggacgatgagccacccctcgcaattcaccttgctgcgcacacggcgtttcctgccgtttttcatcacccagttgctgggcgcgttcaacgacaacatcttcaagcaatcgctgatcctcgccattctctacaagctcaccatcgacggcgaccgttccatctgggtcaacctctgtgccttgctgtttatcctgccattctttctgttctcggcgctggccgggcagtttggcgagaaattcaacaaggacgcgttgatccgcgcgatcaagatcggcgagatcgtgatcatggcggtgggtgccaccggcttcctgaccaaccatctggaattgatgctgctggcactgtttgccatgggcacccactcggcgctgttcgggccggtgaagtattcgatcatgccccaggccctgcatgaagatgagctggtgggcggcaacggcctggtggaaatgggcacgttcctggcgatcctggccggcaccattggcgccgggatcatgatgtcgtccacccattacgcgccggtggtggccgtggcgattgttggcgtggcggtgttgggttacctggccagtcgcagtattccgcgggcggcggcgtcgaccccggggctgcgcctgaactggaatatcttcagcgagtcctgggccaccctgcgcctgggcctggggcagacgccggccgtgtcgcgttccattgtcggtaactcgtggttctggtttgtcggtgcgatctacctcacgcagatcccggcctacgccaaggaatggttgtacggcgacgagaccgtggtgacgttgatcctcaccgtgttctcggtcggcatcgcactgggctcgatgctttgcgaaaagctgtccgggcgcaaggtggaaatcggcctggtgccgttcggttcattcggcctgaccgtattcggcctgttgctgtggtggcactccggcggcttcccacagaacgtgcaggccaacgactggctcgccgtgctcagctatggccaggcctggtgggtgttgttggatatccttggcctgggtgtcttcggcggcttctatatcgtgccgctgtatgcgttgatccagtcgcgcaccgccgagaacgaacgtgcgcgcgtcatcgcggccaacaacattctcaatgcgctgttcatggtggtctcggcgatcgtatcgatcctgctgctgagcgtggccaagctgtcgattcccgagctgttcctggtggtgtcgttgctcaacgtcgcggtcaacgcctacatcttcaagatcgtccccgagttcaccatgcgtttcatgatctggctgctcagccattccatgtaccgtgtggagcaccgcaacctggaggcgattccggatgaaggcgcggcgttgctggtgtgcaaccatgtgtcgtttgtcgatgcgctgttgatcggcggcgcggtgcgtcggccgattcgctttgtcacgtactacaagatctaccgcttgccggtgctcaactttatcttccgtaccgccggggcgattccgattgcggggcgtcacgaagatattcagatctatgaaaaggccttcacacgcattgcgcagtacctgaaggaaggggaattggtgtgcatcttccccgaaggcaagttgaccgccgatggcgagatgaacgaattccgcggtggcgtgacgcgcattctggaagagacggcggtgccggtgattccgatggcgttgcaggggttgtgggggagtttcttcagccgcgatccgaacaaggggttctttcatcggatctggtcgcgggtggtgttggtggcgggtggcccggtggaggagccgacgcctgcgaggttgcaggaggtggtagctgggttgcgggggagtgtcaggtagttttgggtttggctgtactggcctcatcgggggcaagccccctcccacattttgactgtgttcacaaatcaaaggtgggagggggcttgctcccgatgacggtagtggctcaggtgctgatcttgaggccaatcagcccacagatgatcaacgccacactcgtcagccggaacaacgccatggactcgccaaacaggataatccccgcaatcacggtgcccacagcccccacgccggtccagatcgcataggcggtgcccagcggcagttccttcatggccagccccagcagaccgaggctgatggccatggcagcaatcgtcaaggcggtgggcagcggcttgctgaaaccgtcggtgtacttcaggccgacggcccagccgacttcgaataacccggcaaaaaacagaatgatccaggacatgatgacctcctaacgataggtggggtcgtccccggattaggcgcttgaagcgtcgcgaggtcgtccccgcgaagctcggtagagtgccgaaaagtacccggctgatcaagtttgcggcgtgttctccagggcgcgacggtcttccttctcgctcatgcggcgaaagtaggtcgacagcaatgccccggaaatattgtgccagacgctgaacagtgcactcggcaccgccgccaacggtgaaaagtgcgcactggccagcgcggcacccagcccggagttctgcatgcccacttccaacgccagcgacttgcgctgtgccaaaggcagcttgaacacgcggccggtgaagtagcccagcaggtagccgaaactgttgtgcagcatcaccacggccatgatcaacaggcccgattcggcgatcttcgcctgactggcggcaaccaccgccgcgacgataatcacgatgctcaccaccgacaccagtggcaatacatccaccgcatggcggacccgatcaccgagcacgcgttgcgccagtacgccgagcacgatcggcaacagcaccacctgcaggatcgaccagaacaactccatgaacgacaccggcagccaggccgatgccagcagccagatcagcgccggggtgagcagtggggcgaggagggtggtgacggcggcgatggccaccgacaacgccaggtcaccgcgggccagccaggtcatcacgttggacgacgtgccgctcgggcagcaaccgaccaggatcacgccgacggcaatttccggcggcaggtggaaggcctggcacagcagccacgccacacccggcatgatcacaaagtgcgcgaccacgcccagggccacgcgccagggatggcgggcgacctcggcgaagtcgtcgagtttgagggtcagccccatgccgaacatcaccaggcccagcaggggcacgatggcgcttttcaggccgatgaaccagcccggttccaggaaggcgacgacggcgaaaatcaacacccaataggcgaaggtgttgccgacgaagcggctcaaggcggcgagtgcgcgcatggggaggtcctttgttgttggattcgatcaaatgtgggagggggcttgcccccgattgcagtctgtcagtcaaaggtgttttaactgacagaacgctatcgggggcaagccccctcccacattttgatgtcacatggcttagatgccctgcggggtttcttcgccaccgagtgcttcaaccagcgccgggatgaaatcgccgaacgtcagcatcatcagggtgaagctcgcgtccagttggcccagggcttcttcaccgccgtcctgttccgcctggtcttgcagcaggtcttcgaacttcaggcgcttgaccgtcatcttgtcgtcgagcatgaaggacagcttgtcctgccaggccagggacagttgggtcacaactttgccggtggtcaggtgcagctggatctcttcgccggtcaggtcctggcgcttgcagcgcacgatgccgccgtcttcgtgggtgtcgcgcagttcgcattcgtcgaggacgaagaagtcatcggccggcttctgggtggtgacccagtcggtcatgatcgcggttggcgcggtttttaccgtgagcgggcgaaccggcagggtgccgatcacttcacgcagggtcgacagcaggtcttcggcgcgtttcgggctggcggagttgaccaggatcagcccctgtttcggcgcgatggcagcgaaggtcgacgaacgacggataaaggcgcggggcaggaacgcctggatgatttcatccttgatctggtcgcgttccttcttgtagaccttgcgcatttgctcggcctcgatctcttcgactttctctttaagtgcgtcacgcaccacgctgcccggcaggatgcgttcttccttgcgcgcggcgatcagcaggaagtcaccgctgacgtgaaccaggggagcgtcttcacctttaccaaacggcgcgacgaaaccataagtggtcaactcctggctggcacaagggcgcgccagcttggtggccatggccgcttccaacgcctcggcatcaacaggcagatcttgggtcaggcgatagataagcaggttcttgaaccacatggggtgagtctctcctttatacaaaggggggcattattctcttgataacgtcccaggccaaccctgcctaagccattggaagctatcaaaaaaaagatttaagaaagtgcttgccagacttaaggtcgctccgtagaattcgcgccacaccgaaacgaagggtgattagctcagctgggagagcgtctgccttacaagcagaatgtcggcggttcgatcccgtcatcacccaccattcgcttcatgtgttacgcgcagcggtagttcagtcggttagaataccggcctgtcacgccgggggtcgcgggttcgagtcccgtccgctgcgccatattcggtcacctggaacactgaacgccaggtaaccacaggaagcccgctcatcgagcgggctttttgctgtccagggtttgtaaaaccgaaaaaaacgccgccgatcatttccgatgatcggcggcgttttttattgggtaatcagaaatcccagcgggtgctgaccatgaagttgcctgcgccaggtcggcggcattctggcggtagcccagtttgcgtcgcagcttggtgagcagccagccatgatgctcgctgtagagctgggtaatttcccgttggaatggcggttcacccacagacataggcgtggctcaggcgttattgagaatagtttttaattgtgcggtctagccgccggtaaacgcaatagactcgcgtttgaggacacagaagcccgtttttgctgggttttgtcattggcgagaaaatatttcaaataaagtgcatttaaatcaagacattgcggatttttggtgtatgatgccgcccacaccgaaagtgaagggtgattagctcagctgggagagcgtctgccttacaagcagaatgtcggcggttcgatcccgtcatcacccaccattcgcttcaagtgttatgcgcagcggtagttcagtcggttagaataccggcctgtcacgccgggggtcgcgggttcgagtcccgtccgctgcgccatattcggtcacctggaacgctgaacgccaggtcgccctaagaagcccgctcattgagcgggctttttttcgtccgcgatttgacctcccttgccttgacgttgtgcactgcctcttcgccctgaactgtgctggtgcgtcatgacgtgagggaatacccccatgcacattggtcgattgcaccccttgccgcttaaacgtttatctatagccacgcgaagacttccaggcgagtcatcggcagcaggacgctgcggtgcccgctctccaacacaaaaaatagtctgcaaggggaatggctctagatgaaatatccactgcgtccgttggtgttctggccaactttcctgatcctgctggcggcggtgatcgccagctacgttgacctgaatgcgttcctggcgatcagcaaacagctcaacaacctgatcctgaaaaacttttcctggctgttcagcgccggctcgtttgccatggtcgtgctgaccgccatcgtctacttctccgcgctgggcaaggtgcgtatcggcggtgaagacgcgcaaccgttgctgagtaaatggcgctggttcatggtggcactgtgcaccaccctcgcggtaggcgtgctgttctggaccaccgccgaaccgctctaccacctgtacggcccgcccaccagcttgccaatcgaggccggcagcgcggcggcgaagagcttcgccatgtcgacgatgttcctgcactggaccatcaccccctacgcgatctacctggtgccctcgctggtgtttgccctggtgttctacaaccgccgcagcaatttttccatcggcgccatgcttgaaccgttgctcggcgaagcacgggtccggcgctatgccgggctgatcgacaccctggcgatgttcgccctggtcgctggtatggcctcgtccctgggcaccggcgcgctgaccctggctggtggcctggcccagtacatcggcggtgaaaccacgccgttccgcctggccatcatcattgcaatcatcgtcatcacctttgtcgcctcggccgccagtggcctgcaaaaaggcattgtgatgctgtcttcgttcaatacctggatcatgctggccctggggctgttcgtgctgttgtgcgggccgaccttgtacatgttcagcctcggcgtcgaatccctcggcatctacctcgacaccttcttcagccgcagcctgttcaccggcgctgccagtggcgacacctggccgcacagttggacggtgttctactggtcggtgtggtttgcctgggcgccggtgagtgcgctgttcctcggcaagatcggccggggctataccgtgcgcgaattcatccacatcaacatgctctacccggcgttgttcacggccgtgtggatctgcattttctccggcaccagcctgtatttcgatgcgctgggcgacggcagcctcaaccgtgtgctcaacgagcagggcgtggagcacgtgctgtaccagatgttccagcaattgccggccagcggcctgatgatcgcgttcctgctgttcgtggcgttcatctcctttgtcaccgcggcagactccagcaccgacgtgatcgccaacctgtgcagcaagggcgtgactgccgattccgatctcgacggcaacccgctgttgaagattgtctggggcctgatcatcggcacggtgtcgtgggtgatggtcgcgtttgtcggcgtggacggggtgaagatgctctctaacctcggcggtttgccgggcatgatcctggtgttgctggccagtacctcactgatcttctggttgaaaaaccccgcattgctggatgtgaaacgccttcagcggacacctgagacggaactgcgtggcgccagcccgctgccggatttcgcccgctgatcgattgaaccgctgttggagttactgatggaaatcgtcactgagtttacttacaccgtgcgcgagatcgagcactgcctgatccctttgaaggacggcacccaactggccgcccgcatctggctgccgcaagtcgccgacccgcagaccttcccggcgatcctggaatacctgccgtaccgcaagcgcgatggcaccgccgtgcgtgatgcgctgacccacccgtggatggcggggcaaggctatgtgtgcgtgcgcgtcgacatgcgtggcaatggtgaatcccagggcctgatggccgatgaatacctgttgcaggaacaggaggacgccctcgaagtgatcgactggctgtgccggcagccatggtgcgacggcaatgtcggcatgatgggcatctcctggggaggcttcaacggcctgcaagtcgcggcacgccagcccgaggcgctgaaagcgatcatcacgctgtgttccaccgatgaccgctttgccgatgacatccactacaagggcggcaacctgctgatggagaactttggttgggccgccaccatgctcaacttcagcgcggcggtgcctgaccctttgctggtcggcgatgactggaaagatctctggcaacaacgcctggacgccatgccgttgctcgccgaaacctggctgcagcaccagacccgcgatgactactggcgccatggctcggtgtgcgaggactatgcgcagatcaaggccgccgtgtatgcggtcggcggttggggcgacgcctaccgcaataccgtctcgcgcttgatggaaaacctgccagggccgaagaaggccatgatcggcccgtggattcacaaatacccgcacttcgccgtgcccaatccagccatcggctttctgcaggaggccaagcgttggtgggatcactggctcaaaggtgtggataacggcgtgatggatgacgcggcgtgcaccttttacctacaggatattctgcccccgaggggcagttatgccgaacggccgggcatctgggtacagaccgccggctggccggacccacaggtgcaatggactgatttcagcctgggcgaacatggcctgactcctggggcacagcccttggtcacaccgcgtagcatttgctcgccgctgaccacgggcctgcaccagggcgaatactgcgccatctggtttggccccgatggcccgacggatcagcgccgcgatgatgcccactcgctgtgcttcgattcccaagcgctgaccgagccgttggcgttgttgggcgatgcccgtctcacgctgcgcctggcgagtgacacggcctgcggccaattggtcgccaggctgaatgccgtggcaccggacgggcaggtgacgcagatcagttatggcgtgctcaatctcacgctgcgtgaagacttctcttgcgtaacacctgtagtcccgggggaaccgatggaggtacatctaaacctcgaccacatcggcctgcgcttgccggccggttaccgcctgcgtctggccctgagcaccgccagtttcccgttgctgtggccaagccgcgagctgacaaccctgaccttgctggcgaccctgcaaagcctgcaattgccggtgttcaccggcgctgcggtggactgcccgttcgaggcgccgcaatcggcgacgccagtggcgatggaagtcctacgcgccgctgcgccgaaacgcaccctgatcgaagatgtgggcagtggcgaagtctgcgtgaagatcgaagacgacctgggtgcggtgcgttttaccgatcacggcttgtcggtcgaccagcgttgcaccgagcaataccgcaccttgccttgggacccgctgtcgacgcgggcggatatcgaatggcactaccgcgtcggccgtgaccagtgggccgtggaggtggacagccacttgagcgtgcatgccgatgccgagtggttctacatcgaagcggagcagacagcctgggaaaacggccagttggaacatcgtcggcaatggagcaagcgcgtggcgagggtcgcgctgtaagcaggcaactggcaggatgcttgccatcgtgatcgctgcgggcctggggcaacccgggctcgtcattgccaatggaactgctcatgtcgcgtcgaaacgtcgatcttccaccgctcaactgcttgcagacgttcgaagcggctgcccgccatttgagctttacccaggcggctaatgaactgaacctgacccagagcgcggtcagccgtcaggtcaagcgcctcgaagaggacttggcccgcccattgttttatcgcctggcccagggcctgagcctgacgcccgccggtgtgcgttacttccgcaccatccagcgcctgctgcgcgagttggaccgcgagtccgccgagttgcgccggcgtggcgccgaccgccagttgaccctggccagcacgcccactatcagcacgatctggctcgccggcctgttgccacaattccagcgcgaacacccggacctggatatccgcatcctgtgcagcgaaagccccagccatctggacgtcagtgaatatgacctgggcctgttctatcacctggatgaactggccgcgccccacggcctcgagctctcgccggtgttcgacagcgagcaggtcatcaccgtgtgcagcccggcctacctcgaacaccacggcccgattcgcgatatacaccatttgctgcacgctcacaccttgctgatcgtggaggatcactaccacgattggctgacctgggccgactggttcaccgacgccggtgccgactattacaccccgcgccacgcgttgcggaccaacagctatcaactgctgatgcagtcggcggtgatggggcacggcatcgcactgggctggaagagtctgttggaggacgacctggcttccgggcgcctgcaaatggccttgccccataccatgcacagccgcggccgcctgcatctgatgcaaccccaccaccgcaacccaccgtcggccgcgcgcagttttcgccaatggttactggccaagaccgccgcggcggagtcagctggctgaaggtcaacgctggccggtttttttctttcggttctgccgcgtcgccaagtgctcgaaacaaaaagacgcggtgccgaacaccgcaatcagggtgagtacgagcatgccgagggttgagctttccacggtgttttcctacgggtgatggagtaggtcttcacggtagaggcggggagagagtggctcaatagacccgacgcaatccttacgccgccgggtccattgttacgcactttttacggggcgttgcggctgtggcggtaatcgctgaccgcttcatacaccgccttgcgcaagcggttgatgccgccgacagggcgatgttccgctacgccgaaccaggggttgaacgactggttgtcgcacgccaggttctgctcgggggtatcgaagtcctgcgccgggatacgcaccttggccacggtttcgtagggcgcatcgctttccttccactcgatgctggtgtcttcgatcggcatgaatttctgcgggttctgccgctggatctgcagcacgaaacacgcaggcacgcgatcggtggacaactgctggctcaaggcgctgcgcagaaaattcggcaggtcctggttctgtttgggcagtgcatactccgggcaactctgcgggtctggggccacgcggaacttggcgttggccgtgccgaacttgtagggcgagaccgaaaagtaggtggtctgtgtcggactcgccggtgccggcgccagggtcgccagggcgatgaacaagtgacgcacctgccaggtgcgcgggtcgaccttggggaagaacgccaggactttcttgccatccgcctgggcgccgatgttctgtgcgtactccgccacatcactgacaaagaagttcgggtggctgaacatcacgaagtcctgttcggtgcgggtctgctggtcggccagcagttgcttgcccggcacgtccaacagcttgagggccatgccccgtgcatcgcggatgctgtcgaactgcgggtacgcgttgccgttggacagccgcatcagcgcctgccaggtcttgcccggctcggcgaacacgccctggcgcagcgccggatcgaggtcggccattacgctgacttcggccttcacgcagccgtgggccttggcgtgggcgtcgcgcaggtaacgcgtgccttcgcggtgttggtcgacgatgcgcaccgccgtctggatgattccttgggtcatcgccgcttcgccgggcggaatctgttcgtttggcgacaccggcccgctgtgctgccaggcataccaggcggtggcacccagccagccgagcaggccgaggcccaccagccaaagcaaggtcttgcccagaaacgcaccgatgcgcagccacaggcgggcgagcagggaaggtcggtcgtagggggatcgaatcatcatggcagttgttgctccagcgggccgcccagcactttgaggtattccagcagcgcccagcgttcctgcggtagcaggccacggccgatcacgcccttgccacgactgccggcacggaattcatggccgctgttgtggttgccggtgattttggtatcgaacaggaacgcattcttgaacgccgccgtctcgaaaccgagatgacgcgggtcgtagttaaaggtgcctttatagaaggtggtgctgcgctcatcctggggcgagagtaactgatagatcgtcggcaccgagccgttgtgcaggaacggcggcgtagcccacacgccggcgagcggccgtgccttgtaggcgcgcagctcgcgcacgccgatgggcaagccgtatccatccaggcgcggacgctcggccggggtcacgccggcggcacggtaggcgtgctcttcgacaaaggcggtgacgtaggcgaggcccttggccacggacatttttttcaggtccagcggttcggtcggcgtcgggtgcagctcgacgttgagtttggccagttccgccgggtcccattgcagggcgctgaggtcgtagcgctggtcggcaatgttgctggcggtgccagggtcagtgccgatgtagtccaccggcagcattttgagcgcctgcaccgggcggccgttttcctgggtgacactgggcacatggcagccggcgcagttttcggtgaacagtgcacggccctgggcggcgaggggcttgtcgatggcgccgaacaggtcctcgggccaggtcggcggcttgaggcgttgcagggtttcttcgatcaggttgaggtcacgcacgcggacgctggacgggtaacgcgcatcgccctggagcggctggccggcggcatcgaaaaagctcagcgtggcgccgacacccagggcctcaccgatattgcgcgccatgggttgctgggccgagccgttccattgcacccagtcgaaggtccagatatcccacaactgcgggtagtccaccgacgcgttggcgacgcgataattgtccggggaaatcgcatcgccaaagctggcgttggcgatacggccaaaggcgtcggtgcggcccgggccttcttcggtgggatagaggccgcgatgagtgtcgttccaggccactttgaggaactggttcagcgattgcttgaagtcctggcgcagttgtttgtgctcggcgtcgtagcgatcaccgagcacttggcgggcaaaacgctcgaacttccacgggttgtagtaggtggcggcgaggctggcgaccaacgcctggccgaaactgccgccgcgcagggtcggaacgctggagggcagtacatgctgggccgaaccgccgtcgatgcgcagggcctggcctttgaagtgcagctcgccggtatggcaggcggcgcaggtgatatccaggtattcaacgttgctgccggcgtttttatgccgggcgaaacccactggcaagttgccggggttctgcgttgtgggcacctgcttggggtcgaccaggaaaccgaagcgtgccaggtagtcgggcgtggcaaaacgtcgctcggaaaacggcagttcgagggcggtgaaccagtcgtagtgcaggccttttacttgcgtgccctggggcgtgaagtaataggtctggcggtcggtggcactccattggtcctggtagtgcacctgctccacaggcacgtagtccggcagcttggggttgatggtgtaatagagcaccacgcccagcaccagggccagcagggtgaatatcaggagtaaaacacgggtaaaaatgcgcaagatggctatccttgtctcggccttgtcgagttgtcgcgttgttatgccactacgccacaggggcggcaagtggccatgagcctggtagtaggcggtcccacgatccgtcgcgggcctgcatcatgaatgaaaatgcttttaaacacgtgaacttatcggaagtttcctgctcacatgccggtagccattggtcgtggccgcctgataagctcgcgactttattcgaatgcccttttggcgcatgaacaaggaaatagcatgaaacagcatcggttggcggcggcggtggccctggttagcctggtacttgcgggttgtgattcgcagaccagcgtagagctgaaaaccccggcgcagaaagcttcctacggtatcggcctgaacatgggcaagagccttgcccaagaaggcatggatgacctggactccaaagctgtagcccagggcatcgaagatgccgttggcaagaaagagcagaagctcaaagacgacgaactggttgaagcgtttgccgcactgcagaagcgtgctgaagaacgcatgaccaagatgagcgaagagtcggcagccgccggcaagaaattcctcgaagacaacgccaagaaggacggcgtcgtcaccaccgcttccggtctgcagtacaagatcgtgaagaaggccgatggcgcccagcccaagccaaccgacgtggtgactgttcactacaccggcaagctcaccaacggcaccacctttgacagctccgtggatcgcggcagcccgattgacctgccggtcagcggtgtgatcccgggttgggtcgaaggcctgcaactgatgcacgtgggcgagaaggtcgagttgtacattccttccgacctggcctacggcgcacagagcccgagcccggcgattccagccaactccgtgctggtcttcgacctggagctgctggccatcaaggacccagccaaggctgacgcgcctgctgcaccagccgccaagaagtaatcggcgcctgaacacacaacgccccgtctcgacggggcgttgttgtttctggggccagcaggcacctgaatgtgggagggggcttgcccccgattgcggtagatcagtcacttatgctgtggctgaaccattgccatcgggggcaagccccctcccacattagagcttggcgaattcaaacgaacgtctgcagccggttacagtctgatataagactcgagtacgggtagccgcacatcaacgccaagtcaatgaaatcttgggttttttttcagtgcgcaaaaaacgcccgatctgactgcaagccttgtactacgtggctttcagcccggaaaataggctctgttcacaaggttatccacaatttgtgtggataaccttttatgtcgcctggaactggagtgacgaatgaaaccacccttcaatttcacccgtttcctgcccatggccgcacgtctcctgggtcgcgggcgcttgccgacgctgttgtttgcggtcgccgccaaaggctcgagccaaggcaaccgcctgggcaagctcaaggatgatctcaagttgctccaggccctgtgcctggcttactggcgcggtgagtaccgggccatcagccccaaggcgctgatctcggtggtggcggggctgatgtatttcctcagcccgattgatgcgatccccgactttatcccggtgttcggcatgctcgatgacattgctgtgctggcatgggtcatgaagaccctggacggtgaactgagcgcgtttcgcgcctggcgagaggcccagcgcccggaaaagctcgccgtggttgagcgcctgcctgcgacgccctcgctgctggcccaggaaaacccgcaaaaaaacccatgacttggctatcccctgcgacctttgtggctgttaggattacactcctaaggaaagagcttacttagtaagtgcagttatcctacggggcagtcatggatattcagataatttcacgtaatggcgaacccgaatatgcggtgttgccatgggatcagtaccaggcgctgctaaaagctgccggtcagcaacagactacgctacctccttcctcatcgactgcccaagccgcccctgcacaggacctgcgcccgctcgccgacctgcgcggcttgcgcgaagccaagggcctggcgatcgagaccctggcccgcaccgtgggcatcagcccgtcatatcttggattgattgaaagtggtgaacgccagccggatgccgcgatccgccgcagcctggcctgggaattgggcgttgcaggttggagggatgaatcttgagcctacgtatcagccgtcaacactgggatggattactcaacgaactggaccaggcgcgccgccagcgccatttgctgacttaccgtgcgctgctggagcgcctgcaatttcccaccccggccatgcagaccctggccgccgccttggaacacctggcggcgctggacgccaaggccgagcagccattgcgcagctcgctggtgatcagccagggtgccagccgtttgccgcgtaccggtttcttcgagtgtgtggagcgcctggggcgtttcagcgggccgtccgatggcgtggccgccgcctcctggcacgcgtcggaagtggtgcgggtgtttgaatacgagtatcccgagtccgccgaggcctaaagcgcctgggagagtgcgtccatgctgtcgatcacatggatgctgtagccggccatatccttggcatggtgcttggcctgcgacgccaactccgccaactggctggcatcgagttgtccacaggcctgtggatataaatgcaccacgccgatggacagcgacagcagtgcaaactcctggcgcacgccctggcggttcaacgccacgaaacagccggcctccagatgctcggcgcggtagaagcgccggcattgggtatggaagtcatccagcagttggttgagccgcttgcgccagtcctgcgggccgagcaccagcaaaaagtcatcgccgccgatatgcccgacaaagtcgcggctgggatcgacgcggtcgttcaggcactgcgccaggcacagcaacacctcatcgccacgcccatagccgtagatatcgttgaacggcttgaagctgtcgatatccacgtaacagatcaccgactcgcgctgttgttgcagcaggcgtgtgaggcactgctggatcggcacgttgccgggcagcagggtcagtggattggcgtagcgcgcctgctggatcttcagctcggtgatcagcttgagcacatcgatcacccggcccaggcccaggtaatcgccattgagggtgatgatgaaatcttcttcgatgcgttgccgcgcacggctggtgagcaggcggctgacctgttgcagcgactggctcaactccaccgcgaggaagtcggtgctcatcaagcggctgatgggcttgcgcgcaaacaggtcggtggcgaacggcttgagcagcgcatccgacagcgaatgccggtgcacgataccgaccgggtggccacggccgtccagcactgccagggagttgaggttggcctggcggcggaacgcttcgagcacctgggcagtggcggtgtcctggtccactgccggctgttcgctgagcagggcgctgaggtcgctgccttcctcgttcagcgccacgttggcgctgtcgggcttgggcagcatcagccgcgcttcctgcggcggttgctcctgtggacggcacagcaggtagccttggaccaggtctacgcccatctctgtcagcaccgccaactcttcgggcaactcgatgccttcggcgatcacctgggcgcgtgacgccttggcgatctgcaggatggagccgacaaactcgcgcttgagcgcatcctgatggatgccgtcgataaagtgtcggtcgatcttcacgtaatccgggcgcagctccgaccacaagcgcaggctggaatagccggcaccgaggtcatccagggcaatcgagaaccccatgttgcggtagtggtgcagggcggtttgcaacaggtcgatatcgttggtgggggtttgttcggtgagctcgatcaccacctggctcggtggaatgccgtagtcgtgcagcagttgcagggtgcgccccggttggtgcgcggtttccatcagcgattgcggcgagacgttgaggaacagcttgcccggcagcttctgctcgctgaagcgtcgacacgcgctttcgcggcaggccatttccagttcgctgaggcgtccggcctggccggccacggagaacaaggcgacgggagagtgcagcgggctgttggacgggccgcggctgagggcttcgtagccgagaatacgccgttcagacaggcaaatgatcggttggaacaggctgtgcaaactgccttgagccaggatagagcccagtgcattcagctgttcggtcatggtcatggcgatctcgatcgaaaaaaaaggaccgcaggcttgaaacctgcggtccttcatttcacgacagaatgatgtctatatgatgacactccagggagcgatcacattaaatcgccatcatttactgcttggccacctgcttgctgatcttcaggtagtccagcaggatccggccggtctcggccaggtaagcgtcgtcttccggcttggttttttccgcttcggccggcagcgcgtcttcgtcttctttcttcagctccttgagtggatcctcacccttggccttgcggcggatgttttccagtacgagttgcttgttttcgatgtcggcgtgctgcgcgcggcggtccacttcgttgaggctgacggttttttcttccatcagcttcttggccagggccagcttgtcgcggatgaacacgaactcggcatccttggcggagcgggtgtcgtggtcagctttcaactgtgccaggaacggtttgaacggatccgacgccggcttgatcgcagggcggatggtgtcccacggcatggcttccggcagggcgctttcgccgatttccttggtgtcgatgatcgacgggaaatcgatgtccggcagtacgccctggtgctgggtgctctgtccggaaacccggtagaacttggccagggtcagtttcagctcgccatggttcagcggctggatggtctgcacggtgcccttgccgaaggtctggccaccgatgatcaaggcgcggtggtagtcctgcatggcaccggcaaaaatctccgaagccgaggccgagaggcggttgaccagcaaggccatcgggcctttgtagaaggcgcccgggttctcgtcttccagcacgtcgacacggccgtcagcgttgcggaccaacacggtcgggcctttgtcgataaacaggctggtcagctcggtcgcttcctgcagggagccgccgccgttgttgcgcaggtcgatgaccacgccgtcgactttttccttctgcagttcggtgaggattttcttcacgtcgcgggtggtggacttgtagtccgggtcgccggcacggaaggccttgaagtccaggtagaaggccgggatttcaatcacgcccagcttgtagtccttgccatcctgcttgaggttgaggactttcttctgcacggcctggtcttcgagcttcaccgcttcacgggtgatggacacgatcttgctggtctggtcgttcggtgcattggtgtgcggaatcacttccaggcgcaccacgctgcctttcggcccacggatcagcttgaccacttcgtccaggcgccagccgaccacgtcgaccatctctttgtcgccctgggccacgccgatgatcttgtcggccggagcgacctgcttggtcttgtcggccgggcctgccggtaccaggcgcacgatcttgacctggtcattgtcgctttgcaggacggcaccgatgccttccagcgacagactcatgttgatatcaaaattttctgcgttatctggcgacagataattggtgtgcgggtcgtaggacatcgcgaaggtgttgatgtaggcctggaagatatcttcggcacgggtctggtccaggcgcgccagttgattcttgtagcgcttggtcaacagctcctggatggccttgggctctttgccggcgatcttcaggcgcagcacttcgtccttgacgcgtttgcgccacaggtcgtcaagcgcggcggtgctggtcagccaaggcgcgtccttgcggtccaccagaagggtttccttctgggtgaagtcgagcttgtcgacgcctttgcccagctcactcagggcgaagtccagacgcgctttgacgcggtccaggtaacgcttgtagatggtgaacgcgggctgcaggtcgccgctcttgaggaagtcgtcgaactgggtcttccacttgtcgaactcagcgatatcgctggccaggaagtagctgcgcgacggatccagcagcttgaggtagctgtcgtagatgatcaccgagcgagcgtcgtccagcggcggcttgctgtagtgatgacgcttgagcaactcgacgacgttaaggctggcaatcacctcatcgcgatcaggttgaagattgtcccagctgttggctgcgaacgtattggtcgacatcgacgcgaagccgagaccaatgaatagagcgagggcggtgctggggaacagatgcttcatgctgattcgacgcgggggcaattgataacgcatattaggccgtctttgagggagccggttccatatggtccggtcgcataatgcaaaaagcccggcgatacagctacgggctcagtccagactcactatggaggcactgtgaaagcattgcaaggcgttgacggtcatgtggagtggttggaagaacccagtcctacttgcgatgtagggcaagttcgtattcgtgtggcggcagcgggcctcaatcgcgccgatttattacagcgggcggggctctatccgccgccgccgggtgccagccacgtgctgggtctggagtgttccggggtgatcagcgaagtgggcgccggctcgtcctggcaagtcggtgaccgggtttgcgcactgctcgccggtggcggcatggccgaggaagtggtggtggatgcgcgccacgtgctgccggtgccggaaggcctgtcgctggtcgaagcggcggcgctgcccgaggtgtacagcacggcgtggctgaatctgttccagttggcgggcctcaagcccggtgaaaaggtactgctgcatgccggcgccagcggcgtgggctcggcggcgatccagttgtgcaaggcgtttggcagtccgtgctgggtcagcgtcggctcggcagagcgcctgacctattgcgaggagctcggtgcacagggcggcgtggtgcgtaccgacggcatcgaggggttgcgggatttcgggccgttcgatgtgatcctcgacccggtcggtggcaactatgcggcgctggacctcaagctgctggccctcgatggtcgttgggtgttgatcggcttgatgggcgggcgtgacgcgcaactggacctggcccaggtactgggcaagcgcattcagttgctgggctcgaccttgcgcagccgcagtgatcagttcaaggccgacctgttcagcgacttgagccagcatgtgtggccgctgtttgttgaagggcggctgagcccgcagttggccaggacctttgcgatcaaggatgccgaagcggcgtttgccgagcttgcgaccaaccggatttccgggaagttggtgttggtgattgacgaaagcctgagctgaattgtaatgcgtttaataatgtgggagggggcttgcccccgatgacagtgggacagtgaagaattcttcatctgacacactgtcatcgggggcaagccccctcccacatttttgatctcggctcaatcagacccagtgatggatcggccagccggccttttcggcatgctcgcgcaacaccggatccgggttcactacctgtggatgttccaccttcagcaacaacggcaaatcattgcgcgagtccgagtagaaatacgcaccgtccagcgtttcaccttcctgctccagccactccagcaagcgggtgatcttgccttcacggtaggtcaatacaccctcggtatggccgctgtacacgccgtgcttcacttcaaggttgatgcccaacacctcatcaatgccgattcgtgccgcaatcggtgtaaccaggtgcgtgccggaggcagagatcaccaggatccggtcgccattcgcacggtggcgggcgatggtcttggtggcgtcgctgtagatcagcggttcgatcacgtcctcgacccacggctccaccaggtgttcgatttcctccggtgtgcggccgatcatcggttcgaggctgaaagccatgaagtcttccatcttcaactggccctggctgtaggcgtccatcagctcgtcgttcctgcgcatgaacgactcagggtcgacccagcccaggctgcccatttgctcgctccacagggtggcgcagtcgccgtggatcagtgtgtcgtccagatcaaaaattaccaatgccatccgtcatgctctctcaataaatcgtcgctgctcaggctacttcacacagggcgctggggtcgatggaaagtgccaggcgttgcccgtccgggtgcaggtcgtcggccgagcggttgagtacgtctaccaccagttccacgccacgggcttcgatgcggtagcggatcacgttgcccagcaggctgtggctgcgcaccagggcatccaactcaccattgcggctcagctcgatggcctccgggcgaatggcgatacggctgttgatcgggcgttgcagcaattgggtggccttgtcggcatccagcaggttgtagttgccgatgaacccggcggcgaatacgtccaccggcgcggtgtagagagtctcggcatcgccgctctgcacgatcttgccctggttcatcaggaagatccggtcggacatggtcagggcttcttcctggtcatgggtcacgaagatcgtggtcaaccccagctcgcgctggatctggcggatctgctcgcgcaggtgcttgcgaatccgtgcgtccagcgctgacagcggctcatccagcagcaacaggcgcgggcgcgtgaccagggagcgggcgagggccacgcgctggcactggccgccggacatctggtgcgggtagcggccggcgaggtccttgagttccaccagttgcagcacttcctgcacgcgcttgtggctgtcgtcggcgttgaccttctgcatgcgcaggccgaaggcgacgttctgttccacggtcatgttggggaacagcgcatagctctggaacaccatgccgatatggcgtttctgcgggctcagcgggacgatgtcctgcccatccagcaggattttgccactgtcgaccgaggtcagcccggcgatgcagcgcagcagtgtggacttgccgcacccggacgggccgagcagggtgacgaattcgcccttggcgatttcgcagttgatatcactgaacaccggggtgccggcgtagcctttctgcaggtgttggacgctgacgaagctcattggcttttgtccttgttcaagatattggcggcccaggtcagcaccagcacaaagaagaagtaggaaatcacgacggcactggtgaagtggccgctgctgttgcgcatgttgttcaggtacacctgcagggtttcgtagcgggtgcccacgaggatgttggcgaacacgaactcgccgaacaggaacgagaacgacagcaacagcgccaccatcaagcctttgcgcaagttcggcagcaccaccaggatcgccgcctgccaggtgctggcgccgagtagttgggaggcgtccatcaggtcgcgcaggttgatcgcttgcaagttgttggtgatcgcccggtacatgaacggcagcgcgacggtgaagtagcagccgatcagaatccacggcgtgcccaccatcgcaaagggcccggagccatacagttgcagcaggcccaccgacgacaccaccggtggtaccgcgaagggcagcaggatcaggatgttcatcagcgcatcgagcttgggaaagtggtaatgcaccacgaacaacagcggcaaaatcagcaccaccgacagcaccagcgcacccacgcacaccagcagcgattgcccgaaggccatcaggaagcgcgggtcgctccacagctgcacgtaccatttcaccgtgaaaccagctggcaggattgttgccgaccaactgctggcgatggagtagacgaaggtgcccaccaacggcagcaccaggattgcaaataacagccacaccaccacacggtggtagagggaggccgggccggcttcagcgcgagacatggtagctcctcttgagcagcagttgatggaccacggtgaccacggtcatcagggccaccagcaccacggccagggcgctggccaggttcgggtcaagggacacgtcaccggacaccagccccgcgatacggatcggcagtacgttgaagttgccggtggtcagcgcatataccgtggcgtaggccccaagggcgttggccagcaggatcacgaatgtaccgagcagggccggggtgagcaccggcaggccgatatgccgccagaactgccagccgttcgcgcccagcagcgacgccgactcgcgccagtcttcgcgcagcgcatcgaatgccgggtacagcagcagtacaccgaggggaatctggaagtaggtgtagagaatgatcaacccggtcttcgaatacaggttgaagtcctgaatgatccccgcctgcttgagcatgatcgtaatgctgccgttgaaacccagcaaaatgatgaaggcgaacgccagaggcacaccggcaaagttgctggtcatgttggcgaaggcggtgacgaagttgcgcagcggcgagtccacccggcgcagggagtaactgccgagggtggcgatgatgatgccgaacacgctggagtagaagctgatctccaggctgaactggatcgcttgcaggtagaacttcgagctgaagatgcgcgtgaagttttccaggccccagccagcctcttcggtttgcagactgttgatcagtacccacaccagcggggcgatttcgaacacgataaagaacagcgcgaaaggtaccaggcacagcagcgctagccatttgcctcggatcatttcaacagctcccggcatacaggtttgtcgtggggtacgcccagcagctcacagacggtgccgcacagctcggtctgtttcggtgcggcgcgggtgtccaggctgaacgcagcgcccagcacaaacagcggcacttcgcgttcttcggggagcaggccattgtgggagcggtcgttgttcatgccgtggtcggcggtgaccagcacctggtagccggcatcgagccaggtgtgcaggtagtcggccaggatgatatcggccgagcgtgcgctgttgcggtactgcggagtgtcgaggccgtgcttgtggccggcgtcgtcgatgttcatcggatgcaccaccaggaagttcggcgcgtgcctgaggcgcaggctttcggcgtcggcgaacaggtgggagtccgggtagtggtcattccagtagaaatgcccgtgctggatcgccagcgccgtgtcgtcggtatgacggtcgcgggcggcgaggaagggcgtgcggttatacaactcgctgacccagtgataagccgccgctgccgtggtcaggccggcgtcggtggcgtaatggaaaatgctgcgctggttggacaggcgcgagacgttgttgtggacgataccgctctggattgggggtacgccggtgaggatgcattcatacagcgggcgggacagggcgggcagttcacattccagtttgtacagggctgcgcgtcctgcgccgacataggcctgcaagtgccccatggcgtgccgcgcaacctcgaagttcaggccgtcgagcacgacaaggatgacattgtgcttcatggggggaggcgctccgcaacgatggacttgactcaatattcctggtgcatctgggttcaagtgtgggagggggcttgcccccgatagcggcgtgtcagtttgaatacctgtcactgatccaccgccatcgggggcaagccccctcccacattggatctccagtggagtccagtgtgaggtggcaggcttacttcatctctacgatgacttgctcgttccacaactgaggcagcttcttggacgtggcttcccaggcatcggcatccttgatcggctgcgggttggccttggtgtactgctcgcccggaatcaggttcttggcgatctcggccggcagtttcaggtcggtttcagcgcggatcggacgcgcattgcctttggccaggttgagttggccggcgtcgctgaagatgtactcgcgggtcagtttggcggcgttcgggtgtttggcgtatttgttgatgatggtggtgtagccggatttcaccgagccgtccgatgggatcagcaccacgtagtcatccgggttggccatcttggccttgtagctcaggccgttgaagtcccagaccacgcccacttcgacttcgcctttttccatggtggcgatggtcgggttggacagcgagagacggccttgctgggcgatcttggtgaagaattgcaggccaggggcgatgttcttttcgtcacctttattggcaatggcggccgccagcacgccattggccgcttgcgccgcggtgctcacgtcgccaatggaaactttgtatttgcctttttgcaggtcagcccagctggtgggcacgtcagaaccgtgcagcagtttcttgttgacgataaacgcgatggtgccggtgtaggccaaggcccagtgaccgtccttgtccttggcccaatccgggacctgggcccaggtggacggtttgtacggcagggtgacgtcctgcttcaccgcaatcggaccgaacgccgcgcccacgtcgccgatatcggcactggcgttgtctttctcagccttgaacttggcgatttcctgggccgagctcatgtcggtgtcaatgtgcttgaggccgtaggtcttggccaggtcttcccaggtgcctttccagttggcccagtcatcgggcatgccgacgctgttgacagcgccttctgccttggcggcagcttccagggtttttagatcggtatcagcggccatggcggcggtgcacatggcaatggtcgagcctaacagtgatgccaggaaaagctgtttcatccgaagctcctttgggcgttttcaacgcggcggttgtttctgcggtgttgttggtctaggtcagagcaatacctgagccaatctaggctcgatggatgacagtttcatgtcgatgtcgtttttaaatcgctgatgtcgctcgtcgcagagtgagcgtagaccatgctcaagcgcccgcagggattggacttggccgatgtattgcagggtgtgctgcgacggatgcacacggactgtcatctgtcggtcatctgtaatacctaggctggcactcaaccgtgcaagcccctttacgcagcggtttgtgcaccttgtcggtgctggtctagtccagataggtaacgttgatgcgtgatgaggcaatcaaggcggtgacatccatcggcctggcgctgcaagagcagatcgaccacggcctgttgccgcctgccagcaaactgcccgccgagcgtaagctcagcgagttgttcggtaccactcggattacggtgcgggaagccttgttacaactggaagcccagggccagatctatcgcgaggaacggcgcggctggtttgtctcgccgccacggctggcctacaacctgatgcagcgcagtcactttcacgcgatggtcagcgaccaggggcgggtggcttccaccgaggtcatctccgcgcggctgcaaccggcgtcggcggcggtgtgtgcgtggctgcagttgccggcgctgtcgagcgtgatccagatttgccgtggccggcgaatcgatgggcgcctggtgttgtatgtggagcactacctgaacccgcagtattttcctgggatcctggcgtgtgatctgaatcagtcgatgaccgagttgtatgcgcgcaagtacgacctgcactacgggcgggtgcgtttcgagatcgtgccgacgtcactgccggtggaggccgccgcggcgttgcgcgtgtcggtgggcagcccgggcttgcgtatcgcccgggtcaactatgaccagcatcagcggttgatcgactgcgacctggagttctggcggcatgatgcgattcatgttggtgtggatgttatgggatcagcgccttgatcacctggtccacattggtttccagctccgccaccggttccgcaccgtccacattcagcaccagcagcttggcgccacttgcagtcaccgccgccgtcaccgcctcgctcggctggcgatgatgcagcaccaccgccacatcgttgtccttcagctcggccgtgagcttctgtaacgcctcgggcgtccagtcggtatccggccgcgcatcggtgctgagcacttccaggttcaaactgctgatcagataagcaaagtgatcactcaggctgaccacgctcaggttgtccgccttggccaggcgcgcttcgctgtcggcggtgagtttgagcaggcgctgcttgagggcggcaaggttggcgtcgattttcggcttggcatccggggccaggcggcccaggtcggcggccagtacatcggccatgcgccccatattgttgctcgactgccacggctggctgttcaggccatcggcaacgcccggctgtacggcgatgccgggcaagccaccatctaccgggcgggcggcgtcgacttcgacgatgcggatattgctgcgccgcgccaccgggtacagcgggtcatcggcccacaatgagcgcaggccgatggcggcgtcggcgtccagcgccaatttgctcagggccggcgcgccacgcccggtgaagtaggacacctggcgtgaacccggcaagttggccggcgcggcgcgctcaagctgtacgttggtgcctttgagcagcacctcggccaggccgtaggtaatcggcagcgaagcgaggatcttcacctgttttaccgaagtggccttgctcagtgcggcgtggcccaatccctgatggatcttgagaggcttgggctctaacccgtcgaccgccagggccgaagtgctgatgaaacatgtgatggccagagccaatggacgaagtacaggatgcattatccaagattccctttgaggctgggcaccgtgccgcgcgcgatggcggccagggcgaaggcgataccggcgaccaggatgatggcggcgccggacggcacgggcaggtcgaagatgatcggcagcaggatcccgcacagggtgctgactgtggcaatggcgaccgagacccagaagaagcccttgagcgactggctcaacagccgcgccgcagccgccggaatcaccaacagcgcccccaccaggatcgcaccgatgaccttgaccgccgcgacggtgatcagcgtcaccaggatcacgaacaggtagtccagggttttcacggcgacgccgcgtaccgccgccagttgcggattgaaactggccagcatgatgcggttgtacagcggcagcgccagggccatcaccagcgaaccgacaatcgccagcaccagcaggtcgttgccgttgaccgtcaataccgagccaaacagcacgttctcgaggatgtgcacgttgatcttgcccgccaggatcagcaacaggctcgcccccaatgccagtgacactgacaggaacaccccgatcagggtgtccggcgccaggcccgtgcggttgcgcaggtagttgagcaggatgccgaacagcaggcagtagccgaacagcgcgccatacggcccggtgtagggctcacccagcagaatccccaccgccacgccggtcaacgcagcgtggccaacggcttcggagaaaaacgcgaagcgcttgaccaccaccagcgtgcccaggccacctagcaccgggccgatcagcaaaccggcgagcagggcattgaccacaaaaccgtaggccagcgcctccggcagataaccggaagaggcccagccctggaccatcaagcgaaaggcttcataactcattgcgccgggctccgagggtgggtggagaacagggtcagcaggcgctccggggtcagtgcctccttgggcgtggcgtcgaacagcacgcggcggttcaggccggtgacgcggtcggccaggcggcccacggcttccaggtcatgctcgatccacagcacggtgatcccggccaggcgccagtcattgagcaggcgctcgaacacctggataccggcttcgtcgagggccgacatcggctcatccagcaccagcaggtgcggcgccgggatcagcccctgggccagcagcacacgctggcgttcaccgccggacagcgcgcccatgcgccgcttgcgtttgtcctgcatgccgacgcgctccagcgcatccccgatcgcaccggcgtaatgcttggacaaaccgaggaaagccgggcgccgttggcacatggcggccatgaaatcatccacggtcatcggcaagccccggtcgaactccagggcctggggcacatacccgatggtgccgggcgcggccggccaatgcaggctcagccgaccctgatggggcgtttgcccgagcagggtcttgatcagcgagcttttaccgccgccgttggggccgaccagcgcatggatgctgcccggctgtacctggaaactcacggtatcgaggatcacggtgcgacccagggtcagcgatacctggtcgaactcgagcgtcgggccgacgctgaccgccttcagctgttgcgccgccgtcatgccccggactcctgaatcgcccggaccaccgtattgaggttgccggtcatttccacttcgtacttctcggcgctgtattcgccgtaggaaatatgtgacagcgggtacagcttgaccccggactcacgctgaatggtgtcgacgtaggtggacgggaagtccatctccgagaagatcaccttcacgtccagggcgcgcagttcgtcgatggttttcttcaactggctggggctgggctcgatgccatgggccggttcgaccacggcggtgacttccaggccgaactcgcgcaacaggtagtcgtaggccgcgtgcacggtggccacgcgcaggtccgggttgggcgcgctggtcaacttggccagggcatcggcgcgcatctggcgcaggcgcttgccgtaggcgcgggcgttctgggtgtaggtcttggcgttgtccgggtcgagcttgcccagttcacgggcgatgttgttgacctgggcaatcgatgcgctgatcgacaggaaggtatgcgggttgaccactttgcccgcgccgcgtgcggcgttgccggtggcggccagcaacggcacattggcgttggcttcgatcaccgggatgtccggacgctcgctggtggcgatcatgcggtcggcgaaatcgtcatggccgacgccgttgagcacgatcacgtccagggtgccgatgcgcttgatgtcttcggcgcgtggctcgtaggcatgggggttgaagccggccggaatcagcggcaccacctcggccttgtcgccgacgatattggccacgtagctgtaataagggtgcagggtgatgccgattcgcaggcgtttggcggcttcggcattggccagaggggcgagcatcaggctgaacaggccaaccagcaacaggcgcaacaggggcgatgaaatagacatgggcaatcggtcttctcgttcagtgacggtgctggcgggtgacgccggcatcgaattgcgcaaccacctgctgccagccggctgcgatcagcgcctggtcagagaggtcggagggagcggcgaggttggcctggcgattgagccagatgtccggctcgacaccgtgcacgcgcatcagcagtgaaccgctggtcgccggcgcctggctcacacccaggtaggccgaaggctccagcaattgccagcggtgatcgccacggctgaccgaactggcatcctgggcaaagggagcgaagccttcttcggccagttgcgccgggctgggcagcgcgctttgctcctgctgcaacagttggatctcatccagggtcacccgcaggtcggcataaatgccttgctcggcggcgctcaggtcgcggcgggcgtccaattggtggctcggtattgccgccacctcctgggattcaccgtgcagcgcgaccaccgagccggccaccgcgaggatgatcaggcacaacagcagcacgtagagggtttcgtgaccggcaccggcggggcgtacaacctgtgtggtactcattgcggctggatatccgcttggtcgatttccaccacatggccgggaccggcatcaaacagcacgtagaactcggcggacggtttcttgaaggtcagggtcgagtcctgaccgagtttgccgggcaccaggatggtttcgtcatagccgatcacgtccagggtcacgccgggtgcaccactgccgtcggagaagccgcctttgcattggatctgctcgccggggatctccttgcactcgcacatcgggttgtgggcgagcgcgacggtgctgaagccggcacctatcaacaggacgccacaggcgcgggtcaatcgcatcaaattcatggtttaactccttgcttgttcagccaggcaatcgtggcaggcgaggcctggctcaacgggatggaaccctggtgcatgctgccgtcccagccttccatggtcacccacagttcggcgtcgacgggcgtgcgttccgggatcggcaggccggcgcccatgcggtacggcgtgccgaagaagatcaccccggcagcccgcaggctgcgcggcttgccgatgcgcaggtaggtggccttgacctggtcggcacagctgtcgcacagggcggcgttgaagaacttcatcgggccggccgggtcgggacgcgggccttcattgcgaaactcggcaagcttcaggctccacgggccgacctgcacgtcgccagccactcgctcgccgataccggtgtcgccgcgaaacagtgccgcatcggcaaagtacttgggcatgaagcccagcggcaccagcaacagcagcacgttgatatggaaacgccatttcagccagaacgcccgcagaggcgatggctttgccgcagcgaccttgctcatgagttggcctccgaggtttctgcctgccgggcggggagggaaaccggtttgtgttgagccttggcttcacgcttgaaggcattgagggtggccaaagcggtgcgcttggtccagatcagcaggccgctcaacaccatcatgctcatgatcaggccgaagaatgcccagatcagcttgatccagatcccgccgaagtcgccggtgtgcagcgggcgcatggattcggtgacgaactccagcttcgagcggtcggacagcaggtgcgccgctgccacttcaccgtcgtaggggttgatctgtgcggtctggaacatcaacgggtaccagccccgcccgccgatctgcaggtggctgtaggcattcaggggcaggctgatgaaactcgcctccaggccaggaatgcgctgggtggcgatcttgatcgcctcgtccaccggaatcatgggggccggcacgccaggcgcggacatcggcactttctcccgggcaatcacggggatgaccggttcagtggaaatcgaaatctggttgtcgcccaaaatcgcgcggatcaggaaccagatgccggtgaccgagatcaccgcaatgaaccagatcgaccagatcccgctcaagcggtggaagtccccccagaaaatccgcgcgccgtggcggattcgcagggtcgggcgcaggaagcctttccagaaccgcttgtacaccaccagcccggtgaccagcgacgccagcagcgggatgccgagtgccgacaccaggtaccagccccagctgtagccgttggtgaagggcaccagccaccagccatgcagggcgcgggtgaattgctggaagttgaaggacgggctgatgccctggatcgccccggtgtacgggttgacgtagacctccaccgaacgcccgtcggggtagctgaggtcgacgctcaaggcaaagtgcgactcgtcggggcggctgatcgactgcacgtacacctggggttcgtcgcgcttgatggcggcgatcacctggtcatagctcagcggttcggcatcgtccgagggcttgctcgcacggatatccgggttggccagccagacgatctcctggctgaccaccgccagggtgccagtgacgcagacaatcagtacaaagaaccagataggcaatgccagccagctatgtacgagaaaccagagtttggagcgtgacttcttcgacatgtgaatgagggtcttgatcggaggggggcaatggaggcccggaaaaggccagtcgtagcttttgctgacgcgacgggctgtatctaagttaagacggatgagaatgagaaatccctaaggcggatatgaaagaaaatgtttcaggttcacattcagggcgctttttcgccttgatcgaacacgaaacatgttccaagccatcacccaggcgccattgatggggcggggcggctgcgtaggatgggcgcataccgttgagcgagcgcctacaaaagtgagtttagaaaaatgactgcccgaaccctctacgacaaacacatcgattcccacacggtgtgccccctggatgaccagggccatgtgctgctttatatcgaccgccaggtgatcaacgaatacaccagcccccaggccttcagcggcttgcgtgaggccgggcgtaacgtgtggcgcccaggcacggcgctggccgtggtcgaccatgtgaaccccaccacgcccaagcgcatcgcggcgatgcccgacgcaggcggggcgcggcaagtgtcctacctggcggagaactgccgggacttcggcatcgagctgctggacatcctcgacaaacgccagggcatcgaacacgtgatcgccccggagcagggctttatcctgccgggcatggtgatcgccgccggtgacagccacaccaccacctacggtgccctcggcgccttcggttttggcatcggcacttcggagatcgaacacctgctggcgtcgcagacgctggtctacaagcgtctgaagacgatgcgcgtgagcgtggacggcaatctggcacccggcctgacgtccaaggatgtgatcatggcgctgatcggcaagatcggcgcttccggtgccactggctatgccatcgagttttgtggttccactatcgatgtgctgagcgtcgaggcgcgcatgaccatctgcaacatggcggtggaggcgggcgcgcggggtgcgttcatggcgccggacgaaaaagtcttcgcctacctcaagggcaagccgcgtgcaccacaaggcgagctgtgggaccaggcgctggtaggttggcgccaactgcactcggacgctgatgcggtgttcgaccaggaagtgcacctcgacgccaccactctggaacccatggtcacctggggcaccagccccgaccaggccgcgcccatcggcgcccgcgtgcccgacccgcaggatgtcagcgacctgatcctgcgccaggacatgcgccgcgcgctcaactacatgggcctggaagccggtatgccgctgagcgagatcgtcatcagccatgccttcatcggctcctgcaccaacgcccgcatcgaagacctgcgcgacgccgccagcgtggtgcgcggcaagcgcgtggctgaacacgtgcgggcgatgatcgtgccgggctccaccgaagtgcgtgaccaggccgaagcggaaggcctggcggcgatttttatcgatgccggctttgaatggcgccagtcgggttgctcgatgtgcctggccatgaacgacgacgtgctcgcccccggcgaccgctgcgcgtccagcaccaaccgcaacttcgaaggccgccagggcgcgggtgcacgcacccacctgatgagcccggcgatggtcgccgccgctgcgattaccggccgccttactgatatccgccactttggagcgcgcccatgagcctgcaacccttcaccctggtcaccggcaaggccgcgccgatgctggcggccaacatcgataccgatgtgatcatgcccaaacagtttctcaagggcatcgaccgcagcggtctggaccgcgggctgttcttcgacctgcgtttcttggcgtccggcgagcccaaccccgagttcgtgctgaaccagccggcctggcagggcgcgagtttcatggtggtcgggccgaacttcggctgcggttccagccgagaacacgcggtatggggcttgaagcagatgggcatccgcgcattgatcggcagcagctttgccggaattttctatgacaattgccagcgcaacggggtgttgttgatcaccttggacgaggcggtgttgcagcagctgggcaagaccgtcagccaggcggaccaggcgcagatcaatgtcgaccttgaagcccagcagatccatttggcggatggccaggtgatcccgttccagatcgataccctgcgcaagactgcgttgttgcagggcctggatgccatcggcagcaccttgcagcgcagtgacgagatcaaggccttcgaacgccggcacctgcaagccaacccctggctcacctgacatacttaggcctaaatgtgggagggggcttgcccccgatggcgatgggtcagtcaacttctgagtgactgacactctgcaatcgggggcaagccccctcccacatgtttatccggatcataccgcttagattgagagccccttgaagtgctcctgcaaaaactccacgcaggcccgcagctttccggaatacgccaaccgtgtcgggtacaccgcccacacgttggcgctctgggtataaccgtgcagtatctgcacgagcttgccttgctccagcagcggcttaacatcccacatcgagcgcagcagcaccccgcgcccatccaatgcccactgcaacacaatctcgccattgttcgatgacagcggcccacgcacgcgcacgctttcctgggtgccgtcgcgctccaggttccagatgccaaacgcgttatcacgctccttgagcaccaggcagtcgtgctgctccaggtcgctcaactgttgcggtgtgccgcgtcgctccagataagccggggcggcgcacagtacgcggcggttgctcaccaggcggcggccgatttgctggccagggatgtcgtcacccacgcggatctccaggtcgaagccttcgctgacgatatccaccacgcggtcgaataggtccaggcggatttccaggtccgggtattgctctgccagtaacgacagggcgggggccacatggttgcgaccgaagccgaagctgctgcacaaatgcaggtggccgcgcgggctgtcatgggcgtcggagagttcatcggagagatgctggaagtcttcgaggatgcgcacggcccagcgctgcacccgttcaccgtcttcggtcagggcgatgcgccggctggtgcgatgcaacaggcgggtggccagggtggtttcgaggatctggatgcgcttgctgacatacgccggcgacaagcccagctcatcagcggcggcagcgaagccggccttgcggatcacggtcaggaacacccgcaggtcttcgggtaggggcacggtatctttcttgttagtcatcgcaaacagggctggcggcatgagccgccagaatagcaccggttgagcgcgccttccggcacgcccaggtgttgtcgattattcggcggcgaccttggcttgagcagccgcccgagcatcgcggccgcgcttgagagcgatgggcgccattttttcgcggtccagttcaccctcccaggcggctaccaccagggcagccacggcgttgccgatgatattggtcagcgagcggcactcggccatgaaacggtcgatgccgaggatcagcaccatcgccgccaccggtacggtcggcaccaccgccaggctggcggccaatgccacgaaccctgcgccaaccactgcgcctgcacccttggacgtgagcatggccaccgccagcaaggtcaactgttgctcaagcggcagatcaatattggtggcctgggccaggaacagcaccgccagggtcatatagatgttggtgccgtccaggttgaaggtgtagccggtcggcaccacgatgcccaccacgcctttggaggcgcccaggctttcgagtttctggatcaactgcggcaacgccgattccgacgaactggtgcccagcacgatcaacagttccgacttgatgtagcccatcaacttgaaaatgctgaacccggcgtagcgggcaatgctgcccagcaccaccgccacaaagaaaaacgcggtgatatagaaggtgcccaccagcttcagcagcggcagcaacgaacccaccccgtatttgccgatggtgaacgcgatggcgccaaaggccccgatcggcgccactcggctgatgatgccaacgatgcggaagaacacctcgctggcctggttgaccacacccaccagtggccggcccttttcaccgaccattaccaggcccacaccaaacagtacggagacgaacagtaccggcaggatttcgcccttggagaacgcatcgaagaaggttgcggggatcacgtgcaacaggaatccggtgatgccttcgccatgttcggcctggccgacgaagttggcgatggccgaactgtcgagggtcttcacatcgatattgaagcccacgcccggatgcaacaggtgcgcggcgagcatgccgatcaacaaggcgatggtcgagactatttcaaagtacagcagcgccttgccgccgacccggcccacctgcttcacgtcgtgcatgctggtgatgccagacaccaccgtgcaaaagatgatcgggccgatgatcatcttgatcagcttgataaaaccgtcgccaaggggcttgaggtcgatgccgatctgcggccattgatggccgatcaacacacccaatgcgatagcgatcagcacctggatatacagggttcccagcagttttctgattgtcattgttattatctcgagacgttgttttgggcaaagcgaacccgtcgcaggccattggcagcctgcgaggcgggcggatcagttcacggggtgacgcagttgctcagcgaaggaaggtcaggacttcgcccagcagcaactcaggggcttcttcagcaatgtaatggccggccggcagggccttgccacgcacgtcagtggcgactttctgccattccttgagcggctcgaagcagcgcccgacagtgccttcggcgccccacatcaccagcaacggcaggttcaggtgattgccggcgtcgatgtccgcctggtcgtgctccaggtcgataccggcggcagcccggtagtcctcgcagatgcccgtggcggcgcccggcagtttcaggcagcgcaggtattcggcgaaggcttcctgggtgaacggcttgagcccggcgctgcgactgcccatcacgctgcgcaggtacagctccgggttgccttcgatcaaggcttccggcaacggcgccggacggatcaggaaaaaccaatgccagtaggcacgggcgaaggcttcgttggtctgtgcgtacatggacagagtgggggcaatgtccagcaggaccatgcgttgcacggcggccgggtggtccagcgccaggcggtgggccacgcgggcgccacggtcgtgggccagcaccgagaacgtgtcgaagcccagcgcctgcatcagctcgacgccgtcccgggccatttcccgtttcgagtaattggtatggtggtcattggccggtggcttgctgctgtcgccatagccgcgcaggtcggcggccaccacggtgaagtgttcagccagttgctcggcgattttgtgccagatgacgtgggtttgcggatgcccgtgcagcaggagcagaccgggacctgtaccacctttgcggtagctgatgtccacgccgttgacgtggtactggtctttatggaatccggcgaacatggaatgactcctctttgtaattgcttgcatcctggaatcacgcggcgttcggggcaagggcaaaaacgtggagggggtgttcatgaagtgtgatgcaggagcgggctggctcgctcctgcaaagggtcagccctgtttgaacatggcctcggcgcgttcgcggatctgtgcttcggtcaggtcttccttgtgggtggccaggaaccacacatggccgaatggatccttcaacgtgccggagcggtcgccgtagaactggtccttgggttcggagatcggtgtgcccccggctgcgatggcttgtttgtaccgggcgtcgacgtcatctacatacacatgtataccgacgctggtgtggccatcgcgtgggctgccgaacgcgctttcatcgcagggtgaaccgagcatgatcggtgagtcgccgatgcgcagctcggcgtggccgaccttgccgtcgggcatgtccaggcgcatggcttcgatggcgccaaaggctttcttgtagaactcgatggcttcggcggctttttcgacacccaggtagggcgtgatgctgtggaagccctcgggaataggtttaacgctcatatcgttctccttgattgtggttgtggagggacggtcttttcactataggccacgtatcgcgtggcctgcgggcagccgacgaggtgtcgggggcgcatcatgcatggggtgtcggttccaacaactgtgcccctggcccgcgttcaccgagctggtcatcctgattgcgcaacgggcacgcttccagcgacaaacacccacaaccaatacagccattgagcttgtcgcgcagcaacgtcagcttgttgatgcgctcatccaggtcttgccgccacagcgcggacaaacgctgccaatcctgggcgttgggcgtgcgcccctccggcaatgtctgcaaggcttcgccaatcgttgccagcggaatccccaggcgctgggcgatcttgatcaccaccacgcgccgcagcacgtcccgtgggtaacgccgctgattaccggcattgcgattgctcttgatcagccccttggtctcgtagaagtgcagcgcggtgaccgccacaccactgcgggcggccagttggccgacggtgagtgccttgttgagcataaaaactccagataagtgcttgaccttgacttaactagaggttttagcctgcgtgacatcgaatcgcaagattctgcctacagagaaaggggagtgttcatgcaggtatctgagaaaaatcgcggcttcactcaattgatcgagtttcagatcgagccgcagcaacaatctgccctggtgtcagccctgagccttcagagcgaacgcctggcccaaggccatggcggctttatcaatgccagtgtgcaggtcagcgatgacggacggcgggtgctcaattacctgcaatggcactcgcgtgaagacggcgaggcggccttccagtgttttgagcacggcgaggaagatttctggacattgattcgcgcccaccaggccacggccgtgaccttcggttcgttccaggtgctgcgcagtttcgagcgcagccacgacaacgcgttgcactgccggctaaatggataggtgcagcatgcgctcaccttgcacgttttcgccggggcggcgcttgttcaccgccagttcgccgatcttgatcaggcgcgtacgtgtgacgttgcggctcaggccgagcaggctggcggtgtgcacctggttgtagtggctgaaacgataggcggcccgtagcagggcatcttcgactttttcatgcagggcgccggcctgttcttcgaacagcttctggaaggcccgcgctagcaacgcctcggcactgttgtcgctgccgtgctggctgtcgtcctggcgctcgatgcgcatgttcgacaggcgcagatcgtcgcgctcgatcacgccgttacggcagatcaacagggtatggtggatcacgttttccaactcgcggatgttgcccggccaactgtagcttttaagcttgtgctcagcctcgcggctgatggtgatcgggccgtaacccaggcgctggctgtaggcttcgataaagtgccgggtcagcggcaggatatcgccggggcgctcgcgcagcgggctgagttccaggctgaccacgtcgagacggtagtagaggtcttcgcggaagtgcccggcgttgatggccttctccaattgcacgttggtcgcggccaatacgcgcacatcaatcggaatgctcttgcgcgaacccaggcgtacgacttcgcgttcctgcaggacccgcagcagtttgacctggatcgccatgggcaaatcgccgatctcgtcaaggaacaaggtgccgccgtcggcctcctcgaaccagccggccttggcgctgagggcaccggtaaaggcgcctttctcatggccgaacagttcggcctccaccagcgactcggagaacgccccgcagttgaccgctacgaacggccggttgcgccgtgcgctgaggttgtggatgtggcgtgccaccagctctttaccggtcccggtctcgccgatgatcagcacgctggcttcgctgggcgccacttgctggatgtgatcgagcagtgcctgggatttcgggtcttcgaagacctgggccgtggcgcggatcgacgtcgcgagggcaggtgagggcggtagggtcaaaagctgcatgggcacctctcttaggaatagaacgtcggaatcggcaaggagtggttcaatgcccagtcccccagttcgtggagtttgtagtccaccgggtcgtgcagggtttgcgtgcgcaggttgcgccagtgacggtccaggcgcagtgacgcatgggtggagcgcgcaccggtgacttcgaacaggcggctgcacaattccaggccctgctgggtggcggcgaccttggcggtggcgatggcaatcgccagttggccgcgctcgtgctcgctgaggttcgggcctttggcccaggcttggtcgagcaggtcggcggcacgttctaccagcaggcgcacgccttccagggcgacccagaattcgccgtagtggtgcagcacgtatgggtcctggcgcacgtcttcggctgaggatttatgccaggcgcgggtttcggtcagcgtgtagttgcgggcttcttcgaaagcaccttcggcaatgccgagaaacatgtgcgtgaaggtcagttgggcaatcaacgggcgcaggcaggcgaagggcgtgctcagcgggcccggatcgagcagcagctcggattcttcgacgcgcacacgttcgaaactggcgctgccgctgtcggtctggcgctggccgatgttgttccagtcgttgtgcaaggtgatgccgctgcgcccgctggggatcgcggcgatcagcagtttgccaccggcggtttcgtccaccgccgaggcgatcagcatttccgagtcgctggcgccggagcagaagctctttttgccggagaactcgcgccagccgctgaaatccttgaccacggtgcgcgtgtccagcgggttgagggcgttgccccagaaccagtttttgcgcgcggtctgttcgaaccagggttgccattggtccgggcgcgaaaacaggcgcacggtggcgagcatcaggtggtgaaagccgaagacatgggcgatggaactgtcgaccttggcgaattcgcgcacgatacccagggtgtcgctccagcgtgcgccgaggccaccgtattgggggggaatgctcagggccagcaggccgctctggcgcagggcgtcgcgttcggccttgggcgtgccaccgcgctcgtcgcgttcgacggcggtgagggcgaattcggcggccagcagtctggcggtctgcaagggggacggcaggacgctgtggggtttggcggtcacacggtgttcctcattgatctcaagctttggtcggcaacacatcgttggcaatcatttcgccaaacggtccagtgaggttggtgatgccgtgcccggcaaggctggcgtagggctccggcagcaacgggaacaccagctcggcgaagcgataggcttcttccaggtgcgggtagccggagaaaatgaagctctcgatccccaggtccgcatattccttgatgcgttcggccacttgttgcgggttgcccaccaacgcggtgccggccccgccacgcaccaggccgacgccggcccacaggttgggggcgatttccaggttgtcgcggcgcccgtcgtgcagggcggccatgcggcgttggccttcggaatcaaagcgcgaaaaggatttttgcgcggcggcgatggtttcgtcgctgatgtgctcgatcaacgtgtcggcggctttccaggcgtcttcttcggtctcgcgcacgatcacatgcaggcggatgccgaacttcacggtgcgcccgtggcgggcagcgcgttcacgcacatccgcaagtttttccgcgacagccgcgggtggttcgccccaggtcaggtacacgtccacctgctcggcggcgaggtcgtgggcggcgtcggaagaaccaccgaagtacagcggcgggtaaggcttctgcaccggtgggtaaagcgccttggcgttctgtacgcgcaggtgtttgccttcgaaatccaccgattcgccctgcaacacgcgacgccagatgcgtaggaattcgtcggagacttcgtagcgctcggtgtggtcgaggaagctgccgtcaccacggttttcgtcggggtcgccgccggtcaccacgttgatcagcaggcggccattggacaggcgatcgagggtcgccgccatgcgcgccgagacagtcggcgaaatgatgcccgggcgaattgccaccaggtaacgcaggcgttcggtcagcggcaccagcgctgaggcgatgacccaggagtcttcgcacgagcgtccggtaggaatcagcacgccgtggtagcccaggctgtcagccgcctgggcgacttgtttcagataattgagggtgaccggccgcgcaccttgggtggtgcccaggtaatgaccgtcgccgtgtgtgggcagaaaccagaaaacatccatgaccaatccttaagcgattttcagcagagagggggagtgcgcggcaaacaaaggcgctgcgcgttctgccgccagttgaatacgggctttcagcaattcgctggttatctggtagtcggtgaagtcggcttcggtggcgtacacaccgatcggcagggtcagggcttggaagaagctgaacagcgggcgcagttgatgatcgaggaccagcgcgtggcgttcgctgccgccggttgccgccagaagcacgggtgtattgatcagcgcattgaggccgaccaggtcgaacagatgcttgagcagtcctgggtaggagccgcgatagaccggtgcggcgacgatcagcaaatcggcctgttcgatggccaacagttgcgcttcgacttctgccggcagttcatcacgggacagcgcaccacccagcggcctggcgatatcgcccagctcgatcagggtggcctggatcggcagcaaggtcgccaactcagccagcaccgcctgggtcaacaccagggtacgggacgggcgccaggttccgccggagagggcaacgacattcaggggacgggtcatgaacagttcctttttcaacagtggttcatagcaggtggagtgcaaccgcttgagcaagagctgtaccaacgggtgcaggccttgattgacgtgggttgcaggctcactgctgaaaaatgccggtgttggctgcctggtgatttgttgattggctgttgccagggcaacagttgcgtgggcaacagtgccagggcggtgtagcacccgttatagagggttgtatttattccgtaaatgaacgtatttccatatttatagatcataaagaaatataaaaggcactgctatcgaaggtgccttggcggttgatagcaactatcaaggcaggtgatttttcaccgtgaaagggcgggagtagcctgtcttcattgactcgaaacctcctttgcagggccaccgccatgaaccgattcctcgctgtttccttattgattgtcagctcagtccttgccggatgtgcgacccatccttcgcctgaattgcgtccctacaccgcggaagaaaccaaacagttggccctggaggcattgagccgtcgtggtttgtcgtttgacgaatatcaacagcagcgtgccgcactgaccggccagccacagaaacccttcggatttgatcgccagggcgaaatgaacgccgaacgcagcgtgaccctgcatggtcgtcccagttgaatccgcgctcagcggcaaaaaagcccgaggttatccacaaggatcctcgggctttttgttttccatggggcgacttcagcctgttaagctgaatttcaggagcgttcctacgcacatttacataaagtggtccttctttaatggcatgtgatcggttaaacctgacgacctctgtcccggtccgtgcccctgagacgctgctctcgggaacctgctctgcgagtttctaacgtcatgaataaacgtccgttgtatttcgactacgccgccaccaccccggtggatgagcgggtcatccaggtgatggtcgagtgtctgggcttcaatgccaatttcggtaaccctgcgtccagttcccacgcgttcggccaggcggcccggcaaacggttgaacagtcgcgtcgccaggtggccgaactggtcggtgccaaccccgaacaaatcgtctggacctccggtgccaccgagtccaacaaccttgcgatcaagggcgtggcccaggcgcggggcgtggcgggtgggcatatcatcaccagccagatcgaacacaaggccaccctggataccgcgcgacaattgcaggaagccggtgtggccgtgacctacctggtgccggacgccgatggcttgatcagcgccgaggccgtcagcgaagccttgcgtgaggacaccttcctggtgtcgctgatgctggtgaacaacgaactgggcaccctcaacgatatccccgccatcggtgcccgcgtgcgtgaacacggcgcgttgttgcatgtggatgcggcgcagggtgcgggtaaggtggcgatcgatctggcgcagtggccggtggatctgatgtcgttttccgcgcacaaactgtatggccccaaaggtatcggcgcgttgtatgtcgggccacgggcgcagcagaaagtcctggcgcagattcacggcggcggccacgaaggtggcttgcgttccggcaccctggcgacccatcagattgccggcatgggcaccgcgttcgccttggcggcggcgtctttcgctgaagaaaaggcggtgatcgtggctctgcgccagcgcctgcttgaccagttggattcggtggctggtgtgcgcctcaatggcagcgctacacagcgtattccacataccctgagcctcacgttcagtgaaggcgaattcaacgccgctgcgttgagtgcagggatcgcgttttctgcgacctcggcctgcaattcggccagcaatgcaccgtcccatgtgctgctcgccctgggtcatgatgcacgcagcgccagccgcaccatccgcttgagcctcggccggtttaccaccgagcaggatatcgaccaggcggtacaactgatcaaggcggccctcgccagtgcaccggcgttctgggcggtctgattcatctatcgcaacacataataattattcgtggttagcaggagacacaatgagtacgcagcccttgacccatggaacggttccccagcgcctggcgcatacccgtgaactgatgagccgcgagggcattcacgccctgctggtgccgtcggccgacccgcacttgtccgagtacttgccgggttactggcaggggcggcagtggctgtcggggtttcatggctcggtgggaacgctgattgtcactgcggatttcgccggtgtgtgggccgatagccgttactgggaacaggcgaccaaggaactcaagggcagcggcatcgaattggtgaagctgcagccgggccaacccggcccgctggagtggctggccgagcaaacgccggaaggtggcgtggtggcggtggatggtgcggtcatggccgtggcttcggcgcgtaccctgggcggtaagttggcggagcgcggcgcgagcttgcgtaccgatatcgacctgctcgatgaagtctggcaagaccgtccggcattgccgaaccagccgatctatcaacacctgccaccgcaggctactgtcagccgtactgaaaaactcgcttctctgcgtgctgccttgaaagagaagggcgccgactggcatttcattgcgaccctggatgacattgcctggctgttcaacctgcgtggtggtgacgtttcgttcaacccggtgtttgtgtcctttgcgttgatcgatcaacaacaggccacgctgtttgtggcgctgagcaaagtcgacgccgaattgcgggctgtgctggggcaggatggcgtgaccctgcgcgactacagcgaggttgcggatgcattgcgcgcggtgccggcgggcgccagtttgcaggtcgacccggcgcgcgttaccgcgggtttgctggagaatctcgatgccggcgtcaagctggtcgaaggcctcaacccgaccacattggccaagtcccgcaagagcctggccgacgcggaacatatccgtcaagccatggaacaggatggcgcagcgctgtgtgaattcttcgcgtggctggacagtgcgctgggccgtgaacgcatcaccgaattgaccatcgacgaacacttgaccgctgcgcgtacccgccgccctggttatgtgtcgttgagtttcaacaccattgcggcctacaacgccaatggcgcgatgccgcattaccacgccactgaagaagaacacgcattgatcgaaggcgatggcctgctgctgatcgattcgggtggccaatacctgggcggcactacggacattacgcggatggtgccgatcggcacgccgagtgacgagcagaagcgggactgcacccgggtgctcaagggcgtgattgccttgtcccgtgcccactttccgaaagggatcctgtcgccgctgctggatgcgattgcccgcgcgccgatctgggcggaaggcgtggactacggccacggtactggccacggtgtaggctatttcctcaacgtgcatgagggcccacaagtgattgcctaccaggcggctaccgcgccgcaaacggcgatgcaagcggggatgatcacctccattgaaccgggtacttaccgtccaggccgttggggcgtgcgtatcgagaacctggtgttgaaccgcgaagcgggcaagaccgagttcggtgagtttctcaagttcgaaaccctgaccttgtgcccgatcgacacgcgctgcctgttgccatcgttgctcacggcagacgagcgtgagtggttcaacgcttaccacactgaggtgcgcaagcgtttgagcccattgctcagcggtgccgcgctggagtggttgcaggtacgcactgcggctatctgattacctgccaggcagtaacgtgccagggcgttttggccatcaagctctaactcaacgcttcgcgcacaaattccagacggtcctgaccgaagaacagctggttgcctacaaacatactgggggcaccgaacacgccgcgttgaacggcctgttcggtgttgtccttcagggcagtcttaacggtttcgtcattggccaaattcaggatttcattggcggcaaatccgtattcagtgagtacggcagccaggacggcggggtctcccaggtgacggccttcgacccaaaaggcatggaacaggcaatcaacgaagtccaggaaacgttcaggctggtgtaattggatgccggtgaccgctcgcatcaacaccagcgtattgatggggaagtgcgtgttgaaccggagcggtacgttgtagcgccgggcgtaacgcgccaggtcatcaagcatgtagcgaccctttgcaggaacggtgattggagaggcgttaccggtggccttgaacacgccgcccaataacatgggtttatacacaagctgtgtatcggttgccgtgcacaatgccggtagctgggtgtaggccaggtaggtggcggggctgcccaggtcaaagaagaattccagggttttactcatggtcgatgctcgctgcttattgttataggggcgtgcttaccagggttcattccaggggcgcaggtccagttcaaaggtccaggcatcgcgtggctggctgtggaggtgccaatagttatcggcgatatgctcagggttgaggatgccgtcctggtccttgagtgcgtatttctgcgggaagttgtcgcgaatgaagtcagtgtcaatggcgccatcgaccacgacatgggcgacatggatgttcctgggccccagctcccgcgccatgctttgcgcgagcgcccgaatgccgtgcttggccccggcgaatgcagcaaaacctgcgccgccgcgcaaccctgcggtggcgcccgtgaacaggatggtgcctcgattacgcgtgaccatccgccttgccacttcgcgtgcatttaggaagccggagaagcaggccatttcccagatcttgaaatacttgagcgcagtttcttccaggatgctgcacggcacattggcgccgatattgaatacaaaggcttcgatcgggcccagctcggtttcgatctgttcgatcagcgcgatgacgtcttcttctttacgcgcatcgcaggcaaacccatgggcttcaccgccagcggcgtgaatactctcgataaggggctgcaacttatcggcgctgcggcgggtgacacaggccacgtagccttcgcgggcaaagcgtttggcaatggcgccgccggttgcatcacccgcgcccactactaatacgatttttttgttgtgcgtcatgggacctccctcggctcgatgatcgagcaagagtttagacgccgtgtggtgaagggtagggtttgtatctggatttaataggagcagtcagagatgactgctcaggcgattacttgcagataacgatcatgctgcggctggtgtagccggcagggttgaggccgaaggggtagtccccaggctcctcggagttgtcaccggactttgcgattactcggtagcccttggcgccacaggcgttggtcgcactggtgtagcactgctcccaggaagaggacaagccggaacagttgatatgcagcccttttttgccacgtttcacttctgtcttggtggtcgcggcacaaccagcaacggccatgaccattaacagtatcaaaattcgcttcattcctatccttaatagccgccttgcaatgccagaggccggctctactcgctctcgggtgtagcgttcgcgctgtccttgtcgaagttctccatgattgacattcgtttgcggcctaaacatggcctaaatgtgcggtaaataccagagctacattcaaacagacttcaatccgaggcaaccaaaggctttggctcactgcgcatcgtcaccgtggcacctacggaggccagaatgatgcaagtgattgccagccactgagcgagcgataagtgctcgtgcaggaataacaggccggagagcgcgccgaaagccggctcgatgctcatgagggtgccgaaggtgcgggcggggaggcgcgtcagtgcgaccatttccagggtgtaaggcagggcggtggacagaatggcgacgccgatggcgatcgggattagcgcgggagtcagcaatgcgctaccagcatggacgatgccaataggcgcaacaaacaatgcggcgatcatcaccccaagggcggcggtttggaccccgttgtcattccctgctttctggccatatagaatgtagagcgcccagcacacgcctgctcccagcgcgtaggctgcccccagcaagtcgataccgccgctggcctcgcccatcgggatcaacaagagaaggccgatgatggcgagggcaatccacaggaagtcgaccgcgcgccgagaggcgtagatggccaccgcgagggggccggtgaactccagggcgaccgcaatccccaggggcacgctgcgcaatgacatatagaagagaaagttcatgccacccaacgccatcccgtagacgatgacggtgcgtaaggacttggaggtcaggttggcgcgccacgggcgtaacagcagcagcatgatcacgctggcgaaaatcaagcgcagggttgtggtgccttgtgcgccaacgatagggaacatgctcttggccagcgaggcgccggactggatggaggccatggcgatcaacagcaggccgacagggaacagtgtcgaggccaggctgcggggggaggtggtcattggggtattcgtccgaagtcatatatagagaagcaagggcgctatgatgctcaactgtttagtgttgagcaatatattgctcaactatcctttttaatgcgtcatacagggcgaattttgagcgtttccggttctttgatagaaaaagcaaattaagggttgacggcagattctggaagtctataattcgccccacttccggcgcagtcgaaacggaaaactccttggtaaacaaagagttacgcagaattcgacagcgacttgcttc

SEQ ID NO: 104 - DNA, 5092 bp, Pseudomonas nodulensis; identical to SEQ ID NO: 28

SEQ ID NO: 105 - DNA, 1558 bp, Pseudomonas nodulensis
ccagttgcgtgtctcgcctgaccacctttcaggccttttttctctcgcttgcccatagattgccgccctccgggccaagatttcccggtcttttccctcgtggcgctgggcgggtgtcacgaagcggattcggctatgacgatgctcggtgttgtaccaggccataaaattcctgacccagatacgcgcgtcatccaggctgccaaatccatcctgcggccactgcgggcagtacttcagcgttctaaacagcgactccgagtaaggattatcgttgcttacccggggtcttcctctcgatggcgtgatacccaggtcgtacatcttggtcagtaacgtcaccgatttcatcggtgcgccattgtccgagtgaagcaccagcggctgacgccagcacttctctctagtgacacttcgttgcagtaggacagcggctttttcaccgttttctgcttcgtaaacttcccagcccacagcctttcggctgtagatatcttcgatcaaatagaggtagtaaaacttcccacgaactggcgacggcaggtacgtgatatcccaagaccacacctgattggcggctgtcgccgcgtaggtggtgggtgcttcatggcgatgcgggcgtttggcgcgggaacgatgatgctgctgatctgccgcacgcagcactcggtaaaaggttgcctccgatgccatgtaacgtccctcgtcagcgagccgtggcacgatctggctcggtggcagatgtgcgtaggccttgctgttgcacaaggccaggatggcttggcgctcaacatcagtcagagcattattcggcactggcctcaccgtcgtggtgcgcccatctgccaacaacgcttcgggcaggatccagcgttgtagcgtgcgtagcgaaataccgacttctagacacgcaggcgccctgcgggcgcccgcagtgatggcttcggtgagccactcgacgagaagatgccgttctggcaacaaggtcaattgtcctcgtcgtcgttcccccagtaggcattgagcttttttcgcagcaccagcaatgcgactgtttcagccagcgctgcatcctttcggcgcagctcacgctccagctcccgaatccggttcttatcctccttggtctcaccagcgattccttttttcagcgctgagtgattagtgctgttggcaatgaaagctttgcgccagccgtcaatttgctcagggaaaataccgttgcgacggcaatactcactcagctccagctccgacaaagctgatgattcgatgactgccatgagcttggattcggcagaccaactttcaggcgactgcttgttttcggacaactgagaacctctggcagcggcttgcttacgccaataatgaagagacatgtcgctacaaccttcacggcgcgcgacctccgacgctgacaggctcaggggcggaagcatcattttcaacagcgcagctttgcgttcttctgaatagaaaggcatgaccttactcttgccgcccccggaatacttttaaaaagcggaggacacgacaactaccctgacaccggggg

SEQ ID NO: 106 - DNA, 1364 bp, Pseudomonas nodulensis; identical to SEQ ID NO: 75

SEQ ID NO: 107 - DNA, 948 bp, Pseudomonas nodulensis; identical to SEQ ID NO: 31

SEQ ID NO: 108 - DNA, 86370 bp, Pseudomonas nodulensis; identical to SEQ ID NO: 2
  misc_feature (31418)..(31493): n is a, c, g, or t
